(19) United States
(12) Patent Application Publication
(10) Pub. No.: US 2007/0004634 A1
(43) Pub. Date: Jan. 4, 2007

(54) Insulin and IGF-1 receptor agonists and antagonists

(75) Inventors: Renuka Pillutla, Bridgewater, NJ (US); Olga Dedova, Highland Park, NJ (US); Arthur J. Blume, East Greenwich, RI (US); Neil I. Goldstein, Maplewood, NJ (US); Renee Brissette, Clarksburg, NJ (US); Pinger Wang, North Brunswick, NJ (US); Hao Liu, Pennington, NJ (US); Ku-chuan Hsiao, Easton, PA (US); Michael Lennick, Exton, PA (US); Paul Fletcher, Cheshire, CT (US)

Correspondence Address: NOVO NORDISK, INC.;PATENT DEPARTMENT, 100 COLLEGE ROAD WEST, PRINCETON, NJ, 08540, US

(73) Assignees: Novo Nordisk A/S, Bagsvaerd (DK); Antyra Inc., Edison, NJ (US)

(21) Appl. No.: 11/410,222

(22) Filed: Apr. 24, 2006

Related U.S. Application Data
(63) Continuation of application No. 10/253,493, filed on Sep. 24, 2002.
Application No. 10/253,493 is a continuation-in-part of application No. 09/962,756, filed on Sep. 24, 2001, now Pat. No. 6,875,741.
Application No. 09/962,756 is a continuation-in-part of application No. 09/538,038, filed on Mar. 29, 2000, now abandoned.
Application No. 09/538,038 is a continuation-in-part of application No. 09/146,127, filed on Sep. 2, 1998, now abandoned.

(51) Int. Cl. A61K 38/08

(52) U.S. Cl. 514/17

(57) ABSTRACT

Peptide sequences capable of binding to insulin and/or insulin-like growth factor receptors with either agonist or antagonist activity and identified from various peptide libraries are disclosed. This invention also identifies at least two different binding sites, which are present on insulin and insulin-like growth factor receptors, and which selectively bind the peptides of this invention. As agonists, the peptides of this invention may be useful for development as therapeutics to supplement or replace endogenous peptide hormones. The antagonist peptides may also be developed as therapeutics.

### I. CROSS-REFERENCE TO RELATED APPLICATIONS

[0001] This application is a continuation of U.S. application Ser. No. 10/253,493 filed Sep. 24, 2002 which is a continuation-in-part of U.S. application Ser. No. 09/962,756 filed Sep. 24, 2001, which is a continuation-in-part of U.S. application Ser. No. 09/538,038 filed Mar. 29, 2000, which is a continuation-in-part of U.S. application Ser. No. 09/146,127, filed Sep. 2, 1998, all of which are incorporated herein by reference in their entirety.

### II. FIELD OF THE INVENTION

[0002] This invention relates to the field of hormone receptor activation or inhibition. More specifically, this invention relates to the identification of molecular structures, especially peptides, which are capable of acting at either the insulin or insulin-like growth factor receptors as agonists or antagonists. Also related to this invention is the field of molecular modeling whereby useful molecular models are derived from known structures.

### III. SEQUENCE LISTING

[0003] The instant application contains a “lengthy” sequence listing which has been submitted via CD-R in lieu of a printed paper copy, and is hereby incorporated by reference in its entirety. Said CD-R, recorded on Apr. 21, 2006, are labeled “CRF,” “Copy 1” and “Copy 2”, respectively, and each contains only one identical 932 Kb file (65975US2.APP).

### IV. BACKGROUND OF THE INVENTION

[0004] Insulin is a potent metabolic and growth promoting hormone that acts on cells to stimulate glucose, protein, and lipid metabolism, as well as RNA and DNA synthesis. A well-known effect of insulin is the regulation of glucose levels in the body. This effect occurs predominantly in liver, fat, and muscle tissue. In the liver, insulin stimulates glucose incorporation into glycogen and inhibits the production of glucose. In muscle and fat tissue, insulin stimulates glucose uptake, storage, and metabolism. Defects in glucose utilization are very common in the population, giving rise to diabetes.

[0005] Insulin initiates signal transduction in target cells by binding to a specific cell-surface receptor, the insulin receptor (IR). The binding leads to conformational changes in the extracellular domain of IR, which are transmitted across the cell membrane and result in activation of the receptor's tyrosine kinase activity. This, in turn, leads to autophosphorylation of tyrosine kinase of IR, and the binding of soluble effector molecules that contain SH2 domains such as phophoinositol-3-kinase, Ras GTPase-activating protein, and phospholipase Cγ to IR (Lee and Pilch, 1994, Am. J. Physiol. 266:C319-C334).

[0006] Insulin-like growth factor 1 (IGF-1) is a small, single-chain protein (MW=7,500 Da) that is involved in many aspects of tissue growth and repair. It is similar in size, sequence, and structure to insulin, but has 100-1,000-fold lower affinity for IR (Mynarcik et al., 1997, J. Biol. Chem. 272:18650-18655). Although IGF-1 mRNA can be detected in many tissues, the majority of circulating IGF-1 is produced in the liver after stimulation by growth hormone (Butt et al., 1999, Immunol. Cell Biol. 77:256-262). Functionally, IGF-1 appears to act as a mitogen and as an anti-apoptotic factor for cells.

[0007] Recent studies have analyzed the role of endogenous IGF-1 in various disease states. Several reports have shown that IGF-1 promotes the growth of normal and cancerous prostate cells both in vitro and in vivo (Angelloz-Nicoud and Binoux, 1995, Endocrinol. 136:5485-5492; Figueroa et al., 1995, J. Clin. Endocrinol. Metab. 80:3476-3482; Torring et al., 1997, J. Urol. 158:222-227). Elevated serum levels of IGF-1 have been shown to be associated with increased risks of prostate cancer, and may be an earlier predictor of onset than prostate-specific antigen (PSA; J. M. Chan et al., 1998, Science 279:563-566). Serum levels of free IGF-1 are regulated by the presence of IGF binding proteins (IGFBP), which bind to IGF-1 and prevent its interaction with the IGF-1R (reviewed in C. A. Conover, 1996, Endocr. J. 43S:S43-S48; Rajaram et al., 1997, Endocr. Rev. 18:801-831). PSA has been shown to be a protease that cleaves IGFBP-3, resulting in an increase of free IGF-1 in serum (P. Cohen et al., 1992, J. Clin. Endocrinol. Metab. 75:1046-1053; P. Cohen et al., 1994, J. Endocrinol. 142:407-415; H. Lilja, 1995, Scand. J. Clin. Lab. Invest. Suppl. 220:47-56). Consistent with this finding, men with higher levels of circulating IGF-1 and lower levels of IGFBP-3 were found to be at higher risk for developing colorectal cancer (J. Ma et al., 1999, J. Natl. Cancer Instit. 91:620-625.). Recent studies have also shown a connection between IGF-1 levels and ovarian cancer.

[0008] There also appears to be a relationship between high levels of IGF-1 and/or IGF-1R and breast cancer (L. C. Happerfield et al., 1997, J. Pathol. 183:412-417). A positive correlation was observed between circulating IGF-1 and breast cancer among pre-menopausal women (S. E. Hankinson et al., 1998, Lancet 351:1393-1396). A poor prognosis for breast cancer patients was correlated to the expression of IGF-1R positive and estrogen receptor (ER) negative cells (A. A. Butler et al., 1998, Cancer Res. 58:3021-3027). Recently, investigators have identified hybrid IGF-1R/IR receptors found in several breast cancer cell lines (G. Pandini et al., 1999, Clin. Cancer Res. 5:1935-1944; E. M. Bailyes et al., 1997, Biochem. J. 327(Pt 1):209-215; see below). The data has suggested that these hybrids behave as functional IGF-1Rs and may play a major role in IGF-1 signaling in breast cancer.

[0009] Clinical studies have also investigated the use of recombinant human IGF-1 in the treatment of several diseases, including type I diabetes (Carroll et al., 1997, Diabetes 46:1453-1458; Crowne et al., 1998, Metabolism 47:31-38), amyotropic lateral sclerosis (Lai et al., 1997, Neurology 49:1621-1630), and diabetic motor neuropathy (Apfel and Kessler, 1996, CIBA Found. Symp. 196:98-108). Other potential therapeutic applications of IGF-1, such as osteoporosis (Canalis, 1997, Bone 21:215-216), immune modulation (Clark, 1997, Endocr. Rev. 18:157-179) and nephrotic syndrome (Feld and Hirshberg, 1996, Pediatr. Nephrol. 10:355-358) are also under investigation. Clearly, IGF-1R activity is involved in many disease states, indicating that there are potential clinical applications for both IGF-1 agonists and antagonists.

[0010] Both insulin and IGF-1 are expressed as precursor proteins comprising, among other regions, contiguous A, B, and C peptide regions, with the C peptide being an intervening peptide connecting the A and B peptides. A mature insulin molecule is composed of the A and B chains connected by disulfide bonds, where the connecting C peptide has been removed during post-translational processing. IGF-1 retains its smaller C-peptide as well as a small D extension at the C-terminal end of the A chain, making the mature IGF-1 slightly larger than insulin (Blakesley, 1996). The C region of human IGF-1 appears to be required for high affinity binding to IGF-1R (Pietrzkowski et al., 1992, Cancer Res. 52(23):6447-51). Specifically, tyrosine 31 located within this region appears to be essential for high affinity binding. Furthermore, deletion of the D domain of IGF-1 increased the affinity of the mutant IGF-1 for binding to the IR, while decreasing its affinity for the IGF-1R (Pietrzkowski et al., 1992). A further distinction between the two hormones is that, unlike insulin, IGF-1 has very weak self-association and does not hexamerize (De Meyts, 1994).

[0011] IGF-1 and insulin competitively cross-react with IGF-1R and IR (L. Schäffer, 1994, Eur. J. Biochem. 221:1127-1132). Yet, despite 45% overall amino acid identity, insulin and IGF-1 bind only weakly to each other's receptor. The affinity of each peptide for the non-cognate receptor is about 3 orders of magnitude lower than that for the cognate receptor (Mynarcik, et al., 1997, J. Biol. Chem. 272:18650-18655). The differences in binding affinities may be partly explained by the differences in amino acids and unique domains which contribute to unique tertiary structures of ligands (Blakesley et al., 1996, Cytokine Growth Factor Rev. 7(2):153-9).

[0012] IGF-1R and IR are related members of the tyrosine-kinase receptor superfamily of growth factor receptors. Another family member is insulin-related receptor (IRR), for which no natural ligand is known. Both IGF-1R and IR are comprised of two α and two β subunits which form a disulfide-linked heterotetramer (β-α-α-β). These receptors have an extracellular ligand binding domain, a single transmembrane domain, and a cytoplasmic domain displaying the tyrosine kinase activity. The extracellular domain is composed of the entire α subunits and a portion of the N-terminus of the β subunits, while the intracellular portion of the β subunits contains the tyrosine kinase domain. In contrast to other tyrosine kinase receptors, IGF-1R, IR and IRR exist on the cell surface as disulphide-linked dimers and require domain rearrangements rather than receptor oligomerization for cell signaling (Adams et al., 2000, Cell. Mol. Life Sci. 57:1050-1093; Garrett et al., 1998, Nature 394:395-399; Frasca et al., 1999, Mol. Cell Biol. 19: 3278-3288; De Meyts et al., 1994, Hormone Res. 42:152-169). In addition, insulin and IGF-1 hemireceptors (comprising one α subunit and one β subunit) can heterodimerize to form IR/IGF-1R hybrids (M. A. Soos et al., 1990, Biochem. J. 270:383-390; J. Kasua et al., 1993, Biochemistry 32:13531-13536; B. L. Seely et al., 1995, Endocrinology 136:1635-1641).

[0013] In many cells, IR/IGF-1R hybrids are the most common receptor subtype (Bailyes et al., 1997, Biochem. J. 327(pt.1):209-215). The proportion of total IGF-1 R assembled into hybrids varies between 40% and 60% in human tissues (M. Federici et al., 1997, Mol. Cell. Endocrin. 129(2):121-6). IR/IGF-1R hybrids are also overproduced in human cancer cells as a result of overexpression of IR and IGF-1R (Pandini et al., 1999, Clin. Cancer Res. 5:1935-1944; A. Belfiore et al., 1999, Biochemie, 81(4):403-7; V. Papa et al., 1990, J. Clin. Invest. 86:1503-1510; V. Papa et al., 1993, Cancer Res. 53:3736-3740). In particular, increased levels of IR/IGF-1R hybrids have been observed in breast cancer cell lines and breast cancer tissue specimens (Pandini et al., 1999, Clin. Cancer Res. 5:1935-1944). Similarly, high levels of IR/IGF-1R hybrids have been observed in thyroid cancer specimens and cell lines (A. Belfiore et al., 1999, Biochemie, 81(4):403-7). Functional studies have indicated that IR/IGF-1R hybrids are predominantly activated by IGF-1 (M. A. Soos et al., 1993, Biochem. J. 290(pt.2):419-426; A. L. Frattali et al., 1993, J. Biol. Chem. 268:7393-7400). Accordingly, it has been postulated that IR/IGF-1R hybrids provide additional binding sites for IGF-1, and thereby increase cell sensitivity to this factor (Bailyes et al., 1997, Biochem. J. 327(pt.1):209-215; Pandini et al., 1999, Clin. Cancer Res. 5:1935-1944; A. Belfiore et al., 1999, Biochemie, 81(4):403-7).

[0014] IR is a glycoprotein having molecular weight of 350-400 kDa (depending of the level of glycosylation). It is synthesized as a single polypeptide chain and proteolytically cleaved to yield a disulfide-linked monomer α-β insulin receptor. Two α-β monomers are linked by disulfide bonds between the α-subunits to form a dimeric form of the receptor (β-α-α-β-type configuration). The α subunit is comprised of 723 amino acids, and it can be divided into two large homologous domains, L1 (amino acids 1-155) and L2 (amino acids 313-468), separated by a cysteine-rich region (amino acids 156-312) (Ward et al., 1995, Prot. Struct. Funct. Genet. 22:141-153). Many determinants of insulin binding seem to reside in the α-subunit. The β-subunit of IR has 620 amino acid residues and three domains: extracellular, transmembrane, and cytosolic. The extracellular domain is linked by disulfide bridges to the α-subunit. The cytosolic domain includes the tyrosine kinase domain, the three-dimensional structure of which has been solved (Hubbard et al., 1994, Nature 372:746-754). A unique feature of IR is that it is dimeric in the absence of ligand.

[0015] To aid in drug discovery efforts, a soluble form of a membrane-bound receptor was constructed by replacing the transmembrane domain and the intracellular domain of IR with constant domains from immunoglobulin Fc or λ subunits (Bass et al., 1996, J. Biol. Chem. 271:19367-19375). The recombinant gene was expressed in human embryonic kidney 293 cells. The expressed protein was a fully processed heterotetramer and the ability to bind insulin was similar to that of the full-length holoreceptor.

[0016] IGF-1R is synthesized as a 180 kDa precursor which is glycosylated, dimerized and proteolytically processed to yield mature receptor (T. E. Adams et al., 2000, Cell. Mol. Life Sci., 57:1050-1093, 2000). The mature receptor/complex consists of two extracellular α-subunits and two transmembrane β-subunits having tyrosine kinase activity. IGF-1R is expressed in almost all normal adult tissue except for liver, which is itself the major site of IGF-1 production (Butt et al., 1999, Immunol. Cell Biol. 77:256-262). A variety of signaling pathways are activated following binding of IGF-1 to the IGF-1R, including Src and ras, as well as downstream pathways, such as the MAP kinase cascade and the PI3K/AKT axis (Chow et al., 1998, J. Biol. Chem. 273:4672-4680).

[0017] The sequence of IR is highly homologous to the sequence of IGF-1R, indicating that the three-dimensional structures of both receptors may be similar. The α-subunits, which contain the ligand binding region of IR and IGF-1R, exhibit between 47-67% overall amino acid identity. Three general domains, termed L1, cysteine-rich, and L2, have been reported for both receptors from sequence analysis of the α subunits. The cysteine residues in the cysteine-rich region are highly conserved between the two receptors; however, the cysteine-rich regions share only 48% overall amino acid identity. Notably, the crystal structure of the first three domains of IGF-1R has been determined (Garrett et al., 1998, Nature 394:395-399). The L domains consist of a single-stranded right-handed β-helix (a helical arrangement of β-strands), while the cysteine-rich region is composed of eight disulfide-bonded modules.

[0018] While similar in structure, IGF-1R and IR serve different physiological functions. IR is primarily involved in metabolic functions whereas IGF-1R mediates growth and differentiation. Consistent with this, ablation of IGF-1 (i.e., in IGF-1 knock-out mice) results in embryonic growth deficiency, impaired postnatal growth, and infertility. In addition, IGF-1R knock-out mice were only 45% of normal size and died of respiratory failure at birth (Liu et al., 1993, Cell 75:59-72). However, both insulin and IGF-1 can induce both mitogenic and metabolic effects. Whether each ligand elicits both activities via its own receptor, or whether insulin exerts its mitogenic effects through its weak affinity binding to IGF-1R, and IGF-1 its metabolic effects through IR, remains controversial (De Meyts, 1994, Horm. Res. 42:152-169).

[0019] Also, despite the similarities observed between these two receptors, the role of the domains in specific ligand binding are distinct. Through chimeric receptor studies, (domain swapping of the IR and IGF-1R α-subunits), researchers have reported that the sites of interaction of the ligands with their specific receptors differ (T. Kjeldsen et al., 1991, Proc. Natl. Acad. Sci. USA 88:4404-4408; A. S. Andersen et al., 1992, J. Biol. Chem. 267:13681-13686). For example, the cysteine-rich domain of the IGF-1R was determined to be essential for high-affinity IGF binding, but not insulin binding. When amino acids 191-290 of IGF-1R region was introduced into the corresponding region of the IR (amino acids 198-300), the modified IR bound both IGF-1 and insulin with high affinity. Conversely, when the corresponding region of the IR was introduced into the IGF-1R, the modified IGF-1R bound to IR but not IGF-1.

[0020] A further distinction between the binding regions of the IR and IGF-1R is their differing dependence on the N-terminal and C-terminal regions. Both the N-terminal and C-terminal regions (located within the putative L1 and L2 domains) of the IR are important for high-affinity insulin binding but appear to have little effect on IGF-1 binding for either IR or IGF-1R. Replacing residues in the N-terminus of IGF-1R (amino acids 1-62) with the corresponding residues of IR (amino acids 1-68) confers insulin-binding ability on IGF-1R. Within this region, residues Phe-39, Arg-41 and Pro-42 are reported as major contributors to the interaction with insulin (Williams et al., 1995). When these residues are introduced into the equivalent site of IGF-1R, the affinity for insulin is markedly increased, whereas, substitution of these residues by alanine in IR results in markedly decreased insulin affinity. Similarly, the region between amino acids 704-717 of the C-terminus of IR has been shown to play a major role in insulin specificity. Substitution of these residues with alanine also disrupts insulin binding (Mynarcik et al., 1996, J. Biol. Chem. 271(5):2439-42; C. Kristensen et al., 1999, J. Biol. Chem. 274(52):37351-37356).

[0021] Alanine scans of IR and IGF-1R suggest that insulin and IGF-1 may use some common contacts to bind to IGF-1R but that those contacts differ from those that insulin utilizes to bind to IR (Mynarcik et al., 1997). Hence, the data in the literature has led one commentator to state that even though “the binding interfaces for insulin and IGF-1 on their respective receptors may be homologous within this interface the side chains which make actual contact and determine specificity may be quite different between the two ligand-receptor systems” (De Meyts, 1994).

[0022] Based on data for binding of insulin and insulin analogs to various insulin receptor constructs, a binding model has been proposed. This model shows insulin receptor with two insulin binding sites that are positioned on two different surfaces of the receptor molecule, such that each alpha-subunit is involved in insulin binding. In this way, activation of the insulin receptor is believed to involve cross-connection of the alpha-subunits by insulin. A similar mechanism may operate for IGF-1R, but one of the receptor binding interactions appears to be different (Schäffer, 1994, Eur. J. Biochem. 221:1127-1132).

[0023] The identification of molecular structures having a high degree of specificity for one or the other receptor is important to developing efficacious and safe therapeutics. For example, a molecule developed as an insulin agonist should have little or no IGF-1 activity in order to avoid the mitogenic activity of IGF-1 and a potential for facilitating neoplastic growth. It is therefore important to determine whether insulin and IGF-1 share common three-dimensional structures but which have sufficient differences to confer selectivity for their respective receptors. Similarly, it would be desirable to identify other molecular structures that mimic the active binding regions of insulin and/or IGF-1 and which impart selective agonist or antagonist activity.

[0024] Although certain proteins are important drugs, their use as therapeutics presents several difficult problems, including the high cost of production and formulation, administration usually via injection and limited stability in the bloodstream. Therefore, replacing proteins, including insulin or IGF-1, with small molecular weight drugs has received much attention. However, to date, none of these efforts has resulted in finding an effective drug replacement.

[0025] Peptides mimicking functions of protein hormones have been previously reported. Yanofsky et al. (1996, Proc. Natl. Acad. Sci. USA 93:7381-7386) reported the isolation of a monomer antagonistic to IL-1 with nanomolar affinity for the IL-1 receptor. This effort required construction and use of many phage displayed peptide libraries and sophisticated phage-panning procedures.

[0026] Wrighton et al. (1996, Science 273:458-464) and Livnah et al. (1996, Science 273:464-471) reported dimer peptides that bind to the erythropoietin (EPO) receptor with full agonistic activity in vivo. These peptides are cyclical and have intra-peptide disulfide bonds; like the IL-1 receptor antagonist, they show no significant sequence identity to the natural ligand. Importantly, X-ray crystallography revealed that it was the spontaneous formation of non-covalent peptide homodimer peptides that enabled the dimerization two EPO receptors.

[0027] WO 96/04557 reported the identification of peptides and antibodies that bound to active sites of biological targets, which were subsequently used in competition assays to identify small molecules that acted as agonist or antagonists at the biological targets. Renchler et al. (1994, Proc. Natl. Acad. Sci. USA 91:3623-3627) reported synthetic peptide ligands of the antigen binding receptor that induced programmed cell death in human B-cell lymphoma.

[0028] Most recently, Cwirla et al. (1997, Science 276:1696-1698) reported the identification of two families of peptides that bound to the human thrombopoietin (TPO) receptor and were competed by the binding of the natural TPO ligand. The peptide with the highest affinity, when dimerized by chemical means proved to be as potent an in vivo agonist as TPO, the natural ligand.

### V. SUMMARY OF THE INVENTION

[0029] This invention relates to the identification of amino acid sequences that specifically recognize sites involved in IR or IGF-1R activation. Specific amino acid sequences are identified and their agonist or antagonist activity at IR and/or IGF-1R has been determined. Such sequences may be developed as potential therapeutics or as lead compounds to develop other more efficacious ones. In addition, these sequences may be used in high-throughput screens to identify and provide information on small molecules that bind at these sites and mimic or antagonize the functions of insulin or IGF-1. Furthermore, the peptide sequences provided by this invention can be used to design secondary peptide libraries, which can be used to identify sequence variants that increase or otherwise modulate the binding and/or activity of the original peptide at IR or IGF-1R. The peptide sequences of the invention can also be combined to make dimer or other multimeric peptides, which can be used for screening, diagnostic, and thereapeutic applications as described herein.

[0030] In one aspect of this invention, large numbers of peptides have been screened for their IR and IGF-1R binding and activity characteristics. Analysis of their amino acid sequences has identified certain consensus sequences which may be used themselves or as core sequences in larger amino acid sequences conferring upon them agonist or antagonist activity. Several generic amino acid sequences are disclosed which bind IR and/or IGF-1R with varying degrees of agonist or antagonist activity depending on the specific sequence of the various peptides identified within each motif group. Also provided are amino or carboxyl terminal extensions capable of modifying the affinity and/or pharmacological activity of the consensus sequences when part of a larger amino acid sequence. Further provided are peptides containing more than one consensus sequence (e.g., dimer peptides).

[0031] The amino acid sequences of this invention which bind IR and/or IGF-1R include:

[0032] a. X₁ X₂ X₃ X₄ X₅ wherein X_{1,} X_{2,} X₄ and X₅ are aromatic amino acids, and X₃ is any polar amino acid (Formula 1; Group 1; A6 motif);

[0033] b. X₆ X₇ X₈ X₉ X₁₀ X₁₁ X₁₂ X₁₃ wherein X₆ and X₇ are aromatic amino acids, X_{8,} X_{9,} X₁₁ and X₁₂ are any amino acid, and X₁₀ and X₁₃ are hydrophobic amino acids (Formula 2; Group 3; B6 motif);

[0034] c. X₁₄ X₁₅ X₁₆ X₁₇ X₁₈ X₁₉ X₂₀ X₂₁ wherein X_{14,} and X₁₇ are hydrophobic amino acids, X_{15,} X_{16,} X₁₈ and X₁₉ are any amino acid, and X₂₀ and X₂₁ are aromatic amino acids (Formula 3; reverse B6; revB6).

[0035] d. X₂₂ X₂₃ X₂₄ X₂₅ X₂₆ X₂₇ X₂₈ X₂₉ X₃₀ X₃₁ X₃₂ X₃₃ X₃₄ X₃₅ X₃₆ X₃₇ X₃₈ X₃₉ X₄₀ X₄₁ wherein X_{22,} X_{25,} X_{28,} X_{29,} X_{30,} X_{33,} X_{34,} X_{35,} X_{36,} X_{37,} X_{38,} X_{40,} and X₄₁ are any amino acid, X₃₅ and X₃₇ may be any amino acid for binding to IR, whereas X₃₅ is preferably a hydrophobic amino acid and X₃₇ is preferably glycine for binding to IGF-1R and possess agonist or antagonist activity. X₂₃ and X₂₆ are hydrophobic amino acids. This sequence further comprises at least two cysteine residues, preferably at X₂₅ and X₄₀ X₃₁ and X₃₂ are small amino acids (Formula 4; Group 7; E8 motif).

[0036] e. X₄₂ X₄₃ X₄₄ X₄₅ X₄₆ X₄₇ X₄₈ X₄₉ X₅₀ X₅₁ X₅₂ X₅₃ X₅₄ X₅₅ X₅₆ X₅₇ X₅₈ X₅₉ X₆₀ X₆₁ wherein X_{42,} X_{43,} X_{44,} X_{45,} X_{53,} X_{55,} X_{56,} X_{58,} X₆₀ and X₆₁ may be any amino acid, X_{43,} X_{46,} X_{49,} X_{50,} X₅₄ are hydrophobic amino acids, X₄₇ and X₅₉ are preferably cysteines, X₄₈ is a polar amino acid, and X_{51,} X₅₂ and X₅₇ are small amino acids (Formula 5; mini F8 motif).

[0037] f. X₆₂ X₆₃ X₆₄ X₆₅ X₆₆ X₆₇ X₆₈ X₆₉ X₇₀ X₇₁ X₇₂ X₇₃ X₇₄ X₇₅ X₇₆ X₇₇ X₇₈ X_{79 X80} X₈₁ wherein X_{62,} X_{65,} X_{68,} X_{69,} X_{71,} X_{73,} X_{76,} X_{77,} X_{78,} X_{80,} and X₈₁ may be any amino acid; X_{63,} X_{70,} X₇₄ are hydrophobic amino acids; X₆₄ is a polar amino acid, X₆₇ and X₇₅ are aromatic amino acids and X₇₂ and X₇₉ are preferably cysteines capable of forming a loop (Formula 6; Group 2; D8 motif).

[0038] g. H X₈₂ X₈₃ X₈₄ X₈₅ X₈₆ X₈₇ X₈₈ X₈₉ X₉₀ X₉₁ X₉₂ wherein X₈₂ is proline or alanine, X₈₃ is a small amino acid, X₈₄ is selected from leucine, serine or threonine, X₈₅ is a polar amino acid, X_{86,} X_{88,} X₈₉ and X₉₀ are any amino acid, and X_{87,} X₉₁ and X₉₂ are an aliphatic amino acid (Formula 7).

[0039] h. X₁₀₄ X₁₀₅ X₁₀₆ X₁₀₇ X₁₀₈ X₁₀₉ X₁₁₀ X₁₁₁ X₁₁₂ X₁₁₃ X₁₁₄ wherein at least one of the amino acids of X₁₀₆ through X_{111,} and preferably two, are tryptophan separated by three amino acids, and wherein at least one of X_{104,} X₁₀₅ and X₁₀₆ and at least one of X_{112,} X₁₁₃ and X₁₁₄ are cysteine (Formula 8); and

[0040] i. an amino acid sequence comprising the sequence JBA5: DYKDLCQSWGVRIGWLAGLCPKK (SEQ ID NO:1541) or JBA5 minus FLAG® tag and terminal lysines: LCQSWGVRIGWLAGLCP (SEQ ID NO:1542) (Formula 9).

[0041] j. W X₁₂₃ G Y X₁₂₄ W X₁₂₅ X₁₂₆ (SEQ ID NO:1543) wherein X₁₂₃ is selected from proline, glycine, serine, arginine, alanine or leucine, but more preferably proline; X₁₂₄ is any amino acid, but preferably a charged or aromatic amino acid; X₁₂₅ is a hydrophobic amino acid preferably leucine or phenylalanine, and most preferably leucine. X₁₂₆ is any amino acid, but preferably a small amino acid (Formula 10; Group 6 motif).

[0042] In one embodiment, peptides comprising a preferred amino acid sequence FYX₃ WF (SEQ ID NO:1544) (Formula 1; Group 1; A6 motif) have been identified which competitively bind to sites on IR. Surprisingly, peptides comprising an amino acid sequence FYX₃WF (SEQ ID NO:1544) can possess agonist or antagonist activity at IR or IGF-1R.

[0043] This invention also identifies at least two distinct binding sites on IR and IGF-1R (Site 1 and Site 2) based on the differing ability of certain of the peptides to compete with one another and ligand for binding to IR or IGF-1R. Accordingly, this invention provides amino acid sequences that bind specifically to one or both sites of IR or IGF-1R. Furthermore, specific amino acid sequences are provided which have agonist or antagonist characteristics based on their ability to bind to the specific sites of IR or IGF-1R.

[0044] In another embodiment of this invention, amino acid sequences which bind to one or more sites of IR or IGF-1R (e.g., Site 1 or Site 2) are covalently linked together to form multivalent ligands. These multivalent ligands are capable of forming complexes with a plurality of IR or IGF-1R. Either the same or different amino acid sequences are covalently bound together to form homo- or heterocomplexes.

[0045] In various aspects of the invention, monomer subunits are covalently linked at their N-termini or C-termini to form N—N, C—C, N—C, or C—N linked dimer peptides. In one example, dimer peptides are used to form receptor complexes bound through the same corresponding sites, e.g., Site 1-Site 1 or Site 2-Site 2 dimers. Alternatively, heterodimer peptides are used to bind to different sites on one receptor or to cause receptor complexing through different sites, e.g., Site 1-Site 2 or Site 2-Site 1 dimers. In one novel aspect of the invention, Site 2-Site 1 dimers find use as insulin agonists, while certain Site 1-Site 2 dimers find use as insulin antagonists.

[0046] In various embodiments, insulin agonists comprise Site 1-Site 1 dimer peptide sequences S325, S332, S333, S335, S337, S353, S374-S376, S378, S379, S381, S414, S415, and S418; whereas other insulin agonists comprise Site 2-Site 1 dimer peptide sequences S455, S457, S458, S467, S468, S471, S499, S510, S518, S519, and S520, as described herein below. In one preferred embodiment, an insulin agonist comprises the sequence of the S519 dimer peptide, which shows insulin-like activity in both in vitro and in vivo assays.

[0047] The present invention also provides assays for identifying compounds that mimic the binding characteristics of insulin or IGF-1. Such compounds may act as antagonists or agonists of insulin or IGF-1 function in cell based assays.

[0048] This invention further provides kits for identifying compounds that bind to IR and/or IGF-1R. Also provided are therapeutic compounds that bind the insulin receptor or the IGF-1 receptor.

[0049] Other embodiments of this invention are the nucleic acid sequences encoding the amino acid sequences of the invention. Also within the scope of this invention are vectors containing the nucleic acids and host cells which express the nucleic acids encoding the amino acid sequences which bind at IR and/or IGF-1R and possess agonist or antagonist activity.

[0050] This invention also provides amino acid sequences that bind to active sites of IR and/or IGF-1R and to identify structural criteria for conferring agonist or antagonist activity at IR or IGF-1R.

[0051] This invention further provides specific amino acid sequences that possess agonist, partial agonist, or antagonist activity at either IR or IGF-1R. Such amino acid sequences are potentially useful as therapeutics themselves or may be used to identify other molecules, especially small organic molecules, which possess agonist or antagonist activity at IR or IGF-1R.

[0052] In addition, the present invention provides structural information derived from the amino acid sequences of this invention, which may be used to construct other molecules possessing the desired activity at the relevant IR binding site.

### VI. BRIEF DESCRIPTION OF THE DRAWINGS

[0053] FIGS. 1A-1O; 2A-2E; 3A-3E; 4A-4I; 43A-43B, 44A-44B: Amino acid sequences identified by panning peptide libraries against IGF-1R and/or IR. The amino acids are represented by their one-letter abbreviation. The ratios over background are determined by dividing the signal at 405 nm (E-Tag, IGF-1R, or IR) by the signal at 405 nm for non-fat milk. The IGF-1R/IR Ratio Comparison is determined by dividing the ratio of IGF-1R by the ratio of IR. The IR/IGF-1R Ratio Comparison is determined by dividing the ratio of IR by the ratio of IGF-1R. HIT indicates binder; CAND indicates binder candidate; LDH indicates binding to lactate dehydrogenase (negative control); Sp/Irr indicates the ratio of specific binding over non-specific binding.

[0054] The design of each library is shown in the first line in bold. In the design, symbol ‘X’ indicates a random position, an underlined amino acid indicates a doped position at the nucleotide level, and other positions are held constant. Additional abbreviations in the B6H library are: ‘O’ indicates an NGY codon where Y is C or T; ‘J’ indicates an RHR codon where R is A or G, and H is A, C, or T; and ‘U’ indicates an VVY codon where V is A, C, or G, and Y is C or T. The ‘h’ in the 20E2 libraries indicates an NTN codon.

[0055] Symbols in the listed sequences include: Q indicates a position corresponding to a TAG stop codon; # indicates a position corresponding to a TAA stop codon; * indicates a position corresponding to a TGA stop codon; and ? indicates an unknown amino acid. It is believed that a W replaces the TGA stop codon when expressed. The Q residues represent translation read-through at TAG stop codons. Except for the 20 C and A6L libraries, all libraries are designed with the short FLAG® epitope DYKD (SEQ ID NO:1545; Hopp et al., 1988, Bio/Technology 6:1205-1210) at the N-terminus of the listed sequence and AAAGAP (SEQ ID NO:1546) at the C-terminus. The 20 C and A6L libraries have the full length FLAG® epitope DYKDDDDK (SEQ ID NO:1547).

[0056] FIG. 1A: Formula 1 motif peptide sequences obtained from a random 40mer library panned against IR (SEQ ID NOS:1-3).

[0057] FIG. 1B: Formula 1 motif peptide sequence obtained from a random 40mer library panned against IGF-1R (SEQ ID NOS:4-6).

[0058] FIG. 1C: Formula 1 motif peptide sequences obtained from a random 20mer library panned against IR (SEQ ID NOS:7-29).

[0059] FIG. 1D: Formula 1 motif peptide sequences obtained from a random 20mer library panned against IGF-1R (SEQ ID NOS:30-33).

[0060] FIG. 1E: Formula 1 motif peptide sequences obtained from a 21mer library constructed to contain X₁₋₁₀NFYDWFVX₁₈₋₂₁ (SEQ ID NO:34; also referred to as “A6S”) panned against IR (SEQ ID NOS:35-98).

[0061] FIG. 1F: Formula 1 motif peptide sequences obtained from a 21mer library constructed to contain X₁₋₁₀NFYDWFVX₁₈₋₂₁ (SEQ ID NO:34; also referred to as “A6S”) panned against IGF-1R (SEQ ID NOS:99-166).

[0062] FIG. 1G: Formula 1 motif peptide sequences obtained from a library constructed to contain variations outside the consensus core of the A6 peptide as indicated (referred to as “A6L” (SEQ ID NO:167)) panned against IR (SEQ ID NOS:168-216).

[0063] FIG. 1H: Formula 1 motif peptide sequences obtained from a library constructed to contain variations outside the consensus core of the A6 peptide as indicated (referred to as “A6L” (SEQ ID NO:167)) panned against IGF-1R (SEQ ID NOS:217-244).

[0064] FIG. 1I: Formula 1 motif peptide sequences obtained from a library constructed to contain variations in the consensus core of the E4D peptide (SEQ ID NO:245) (as indicated) panned against IR (SEQ ID NOS:246-305).

[0065] FIG. 1J: Formula 1 motif peptide sequences obtained from a library constructed to contain variations in the consensus core of the E4D peptide (SEQ ID NO:245) (as indicated) panned against IGF-1R (SEQ ID NOS:306-342).

[0066] FIG. 1K: Formula 1 motif peptide sequences obtained from a library constructed using the sequence X₁₋₆FHENFYDWFVRQVSX₂₁₋₂₆ (SEQ ID NO:343; H2C-A) panned against IR (SEQ ID NOS:344-430).

[0067] FIG. 1L: Formula 1 motif peptide sequences obtained from a library constructed using the sequence X₁₋₁₆FHENFYDWFVRQVSX₂₁₋₂₆ (SEQ ID NO:343; H2C-A) panned against IGF-1R (SEQ ID NOS:431-467).

[0068] FIG. 1M: Formula 1 motif peptide sequences obtained from a library constructed using the sequence X₁₋₆FHXXFYXWFX₁₆₋₂₁ (SEQ ID NO:468; H2C-B) and panned against IR (SEQ ID NOS:469-575).

[0069] FIG. 1N: Formula 1 motif peptide sequences obtained from a library constructed using the sequence X₁₋₆FHXXFYXWFX₁₆₋₂₁ (SEQ ID NO:468; H2C-B) and panned against IGF-1R (SEQ ID NOS:576-657).

[0070] FIG. 1O: Formula 1 motif peptide sequences obtained from other libraries panned against IR (SEQ ID NOS:658-712).

[0071] FIG. 2A: Formula 4 motif peptide sequences identified from a random 20mer library panned against IR (SEQ ID NO:713).

[0072] FIG. 2B: Formula 4 motif peptide sequences identified from a library constructed to contain variations in the F8 peptide (SEQ ID NO:713) as indicated (15% dope; referred to as “F815”) panned against IR (SEQ ID NOS:714-796).

[0073] FIG. 2C: Formula 4 motif peptide sequences identified from a library constructed to contain variations in the F8 peptide (SEQ ID NO:713) as indicated (15% dope; referred to as “F815”) panned against IGF-1R (SEQ ID NOS:797-811).

[0074] FIG. 2D: Formula 4 motif peptide sequences identified from a library constructed to contain variations in the F8 peptide (SEQ ID NO:713) as indicated (20% dope; referred to as “F820”) panned against IR (SEQ ID NOS:812-861).

[0075] FIG. 2E: Formula 4 motif peptide sequences identified from other libraries panned against IR (SEQ ID NOS:862-925).

[0076] FIG. 3A: Formula 6 motif peptide sequences identified from a random 20mer library and panned against IR (SEQ ID NOS:926-928).

[0077] FIG. 3B: Formula 6 motif peptide sequences identified from a library constructed to contain variations in the D8 peptide (SEQ ID NO:929) as indicated (15% dope; referred to as “D815”) panned against IR (SEQ ID NOS:930-967).

[0078] FIG. 3C: Formula 6 motif peptide sequences identified from a library constructed to contain variations in the D8 peptide (SEQ ID NO:929) as indicated (20% dope; referred to as “D820”) panned against IR (SEQ ID NOS:968-1010).

[0079] FIG. 3D: Formula 6 motif peptide sequences identified from a library constructed to contain variations in the D8 peptide (SEQ ID NO:929) as indicated (20% dope; referred to as “D820”) panned against IGF-1R (SEQ ID NOS:1011-1059).

[0080] FIG. 3E: Formula 6 motif peptide sequences identified from other libraries panned against IR (SEQ ID NOS:1060-1061).

[0081] FIG. 4A: Formula 10 motif peptide sequences identified from random 20mer libraries panned against IGF-1R (SEQ ID NOS:1062-1077).

[0082] FIG. 4B: Formula 10 motif peptide sequences identified from random 20mer libraries panned against IR (SEQ ID NOS:1078-1082).

[0083] FIG. 4C: Miscellaneous peptide sequences identified from a random 20mer library panned against IR (SEQ ID NOS:1083-1086).

[0084] FIG. 4D: Miscellaneous peptide sequences identified from a random 40mer library panned against IR (SEQ ID NOS:1087-1088).

[0085] FIG. 4E: Miscellaneous peptide sequences identified from a random 20mer library panned against IGF-1R (SEQ ID NOS:1089-1092).

[0086] FIG. 4F: Miscellaneous peptide sequences identified from an X₁₋₄ C X₆₋₂₀ library and panned against IGF-1R (SEQ ID NOS:1093-1113).

[0087] FIG. 4G: Miscellaneous peptide sequences identified from a library constructed to contain variations of the F8 peptide (SEQ ID NO:1114) as indicated (F815) panned against IGF-1R (SEQ ID NOS:1115-1118).

[0088] FIG. 4H: Miscellaneous peptide sequences identified from a library constructed to contain variations in the F8A11 peptide (SEQ ID NO:1119) as indicated (referred to as “NNKH”) panned against IR (SEQ ID NOS:1120-1142).

[0089] FIG. 4I: Miscellaneous peptide sequences identified from a library constructed to contain variations in the F8A11 peptide (SEQ ID NO:1119) as indicated (referred to as “NNKH”) panned against IGF-1R (SEQ ID NOS:1143-1154).

[0090] FIG. 5A: Summary of specific representative amino acid sequences from Formulas 1, 4, 6, and 10 (SEQ ID NOS:1155-1180).

[0091] FIG. 5B: Summary of specific representative amino acid sequences from Formulas 1, 4, 6, and 10 (SEQ ID NOS:1181-1220).

[0092] FIG. 6: Illustration of 2 binding site domains on IR based on competition data.

[0093] FIG. 7: Schematic illustration of potential binding schemes to the multiple binding sites on IR.

[0094] FIG. 8: Biopanning results and sequence alignments of Group 1 of IR-binding peptides (SEQ ID NOS:1221-1243). The number of sequences found is indicated on the right side of the figure together with data on the phage binding to either IR or IGF-1R receptor. Absorbance signals are indicated by: ++++, >30× over background; +++, 15-30×; ++, 5-15×; +, 2-5×; and 0, <2×.

[0095] FIGS. 9A-9B: Biopanning results and sequence alignments of Groups 2, 6, and 7 of IR-binding peptides (SEQ ID NOS:1244-1261). The number of sequences found is indicated on the right side of the figure together with data on the phage binding to either IR or IGF-1R receptor. Absorbance signals are indicated by: ++++, >30× over background; +++, 15-30×; ++, 5-15×; +, 2-5×; and 0, <2×.

[0096] FIGS. 10A-10C: Insulin competition data determined for various monomer and dimer peptides. FIG. 10A shows the competition curve. FIG. 10B shows the symbol key for the peptides. FIG. 10C shows the description of the peptides.

[0097] FIGS. 11A-11D: Insulin competition data determined for various monomer and dimer peptides. FIG. 11A shows the competition curve. FIG. 11B shows the symbol key for the peptides. FIG. 11C shows the description of the peptides. FIG. 11D shows IR binding affinity for the peptides.

[0098] FIGS. 12A-12D: Results of free fat cell assays for truncated synthetic RP9 monomer peptides, S390 and S394. FIG. 12A shows the results for peptide S390. FIG. 12B shows the results for peptide S394. FIG. 12C shows the amino acid sequence of peptides S390 and S394 (SEQ ID NOS:1794 and 1788, respectively in order of appearance). FIG. 12D shows the results for full-length RP9 peptide.

[0099] FIGS. 13A-13C: Results of free fat cell assays for truncated synthetic RP9 dimer peptides, S415 and S417. FIG. 13A shows the results for peptide S415. FIG. 13B shows the results for peptide S417. FIG. 13C shows the amino acid sequence of peptides S415 and S417 (SEQ ID NOS:1795-1796).

[0100] FIGS. 14A-14C: Results of free fat cell assays for RP9 homodimer peptides, 521 and 535. FIG. 14A shows the results for peptide 521. FIG. 14B shows the results for peptide 535. FIG. 14C shows the amino acid sequence of peptides 521 and 535.

[0101] FIGS. 15A-15C: Results of free fat cell assays for RP9-D8 heterodimer peptides, 537 and 538. FIG. 15A shows the results for peptide 537. FIG. 15B shows the results for peptide 538. FIG. 15C shows the amino acid sequence of peptides 537 and 538.

[0102] FIGS. 16A-16C: Results of free fat cell assays for RP9-D8 heterodimer peptides 537 and 538. FIG. 16A shows the results for peptide 537. FIG. 16B shows the results for peptide 538. FIG. 16C shows the amino acid sequence of peptides 537 and 538.

[0103] FIGS. 17A-17B: Results of free fat cell assays for D8-RP9 heterodimer peptide, 539. FIG. 17A shows the results for peptide 539. FIG. 17B shows the amino acid sequence of peptide 539.

[0104] FIGS. 18A-18D: Results of free fat cell assays for Site 1/Site 2 dimer peptides with constituent monomer peptides with Site 1-Site 2 C—N (FIG. 18A), Site 1-Site 2, N—N (FIG. 18B), Site 1-Site 2, C—C (FIG. 18C), and Site 2-Site 1, C—N (FIG. 18D) orientations and linkages, respectively.

[0105] FIGS. 19A-19B: Results of human insulin receptor kinase assays for various monomer and dimer peptides. FIG. 19A shows the substrate phosphorylation curve. FIG. 19B shows the EC₅₀ values.

[0106] FIGS. 20A-20B: Results of human insulin receptor kinase assays for Site 1-Site 2 and Site 2-Site 1 dimer peptides. FIG. 20A shows the substrate phosphorylation curve. FIG. 20B shows the EC₅₀ values.

[0107] FIGS. 21A-21B: Results of human insulin receptor kinase assays for Site 1-Site 2 and Site 2-Site 1 peptides. FIG. 21A shows the substrate phosphorylation curve. FIG. 21B shows the EC₅₀ values.

[0108] FIGS. 22A-22B: Results of time-resolved fluorescence resonance transfer assays for assessing the ability of various monomer and dimer peptides to compete with biotinylated RP9 monomer peptide for binding to soluble human insulin receptor-immunoglobulin heavy chain chimera. FIG. 22A shows the binding curve. FIG. 22B shows the symbol key and description of the peptide sequences (SEQ ID NOS:2117, 1916-1917, 1558, 1994, 1960-1961, 2008, 1794, 2015-2016, 1560, and 2001-2002, respectively in order of appearance).

[0109] FIGS. 23A-23C: Results of time-resolved fluorescence resonance transfer assays indicating the ability of various monomer and dimer peptide to compete with biotinylated S175 monomer peptide or biotinylated RP9 monomer peptide for binding to soluble human insulin receptor-immunoglobulin heavy chain chimera. FIGS. 23A-23B show the binding curves. FIG. 23C shows the symbol key and description of the peptide sequences (SEQ ID NOS:2117, 1916-1917, 1558, 1994, 1960-1961, 2008, 1794, 2015-2016, 1560, and 2001-2002, respectively in order of appearance).

[0110] FIGS. 24A-24B: Results of fluorescence polarization assays indicating the ability of various monomer and dimer peptide to compete with fluoroscein labeled RP9 monomer peptide for binding to soluble human insulin receptor ectodomain. FIG. 24A shows the binding curve. FIG. 24B shows the symbol key and description of the peptide sequences (SEQ ID NOS:2117, 1916-1917, 1558, 1994, 1960-1961, 2008, 1794, 2015-2016, 1560 and 2001-2002, respectively in order of appearance).

[0111] FIGS. 25A-25B: Results of fluorescence polarization assays indicating the ability of various monomer and dimer peptides to compete with fluoroscein labeled RP9 monomer peptide for binding to soluble human insulin mini-receptor. FIG. 25A shows the binding curve. FIG. 25B shows the symbol key and description of the peptide sequences (SEQ ID NOS:2117, 1916-1917, 1558, 1994, 1960-1961, 2008, 1794, 2015-2016, 1560, and 2001-2002, respectively in order of appearance).

[0112] FIGS. 26A-26B: Results of fluorescence polarization assays indicating the ability of various monomer and dimer peptides to compete with fluorescein labeled insulin for binding to soluble human insulin receptor ectodomain. FIG. 26A shows the binding curve. FIG. 26B shows the symbol key and description of the peptide sequences (SEQ ID NOS:2117, 1916-1917, 1558, 1994, 1960-1961, 2008, 1794, 2015-2016, 1560, and 2001-2002, respectively in order of appearance).

[0113] FIGS. 27A-27B: Results of fluorescence polarization assays indicating the ability of various monomer and dimer peptides to compete with fluorescein labeled insulin for binding to soluble human insulin mini-receptor. FIG. 27A shows the binding curve. FIG. 27B shows the symbol key and description of the peptide sequences (SEQ ID NOS:2117, 1916-1917, 1558, 1994, 1960-1961, 2008, 1794, 2015-2016, 1560, and 2001-2002, respectively in order of appearance).

[0114] FIG. 28: A schematic drawing for the construction of protein fusions of the maltose binding protein.

[0115] FIG. 29: BIAcore analysis of competition binding between IR and maltose binding protein fusion peptides H2C-9aa-H2C, H2C, and H2C-3aa-H2C.

[0116] FIG. 30: Stimulation of IR autophosphorylation in vivo by maltose binding protein fusion peptides.

[0117] FIGS. 31A-31C: Results of free fat cell assays for insulin and Site 2-Site 1 peptides, S519 and S520. FIG. 31A shows the results for S519. FIG. 31B shows the results for S520. FIG. 31C shows the EC₅₀ values.

[0118] FIGS. 32A-32B: Results of human insulin receptor kinase assays for insulin and Site 2-Site 1 peptides S519 and S520. FIG. 32A shows the substrate phosphorylation curve. FIG. 32B shows the calculated Bestfit values.

[0119] FIG. 33: Results of in vivo experiments showing the effect of intravenous administration of Site 2-Site 1 peptide S519 in Wistar rats:

[0120] FIGS. 34A-34E: Results of phage competition studies with IGF-1 peptides RP9 (Site 1) and D815 (Site 2). Phage: RP9 (A6-like); RP6 (B6-like); D8B12 (Site 2); and D815 (Site 2); Peptides: RP9 and D815. FIGS. 34A-34B show the competition curves. FIGS. 34C-34E show the symbol keys and peptide groups.

[0121] FIG. 35A-35E: Phage competition studies with Site 2-Site 1 dimer peptides containing 6- or 12-amino acid linkers. Phage: RP9, RP6, D8B12, and D815; Peptides: D815-6L-RP9 and D815-12L-RP9. FIGS. 35A-35B show the competition curves. FIGS. 35C-35E show the symbol keys and peptide groups.

[0122] FIG. 36: Results of IGF-1 agonist assay using FDC-P2 cells. Site 1 peptides RP6, RP9, G33, and Site 2 peptide D815 were tested in the agonist assay.

[0123] FIG. 37: Results of IGF-1 antagonist assay using FDCP-2 cells. Site 1 peptides RP6, RP9, G33, and Site 2 peptide D815 were tested in the antagonist assay.

[0124] FIG. 38: Results of IGF-1 agonist assay using FDCP-2 cells. Site 1 peptides 20E2, S175, and RP9 were tested in the agonist assay.

[0125] FIG. 39: Results of agonist and antagonist studies with peptide monomers and dimers. Monomers: D815 and RP9; Dimers: D815-6aa-RP9 and D815-12aa-RP9.

[0126] FIG. 40: Results of agonist and antagonist studies with peptide monomers and dimers. Monomers: G33 and D815; Dimer: D815-6aa-G33.

[0127] FIG. 41: Results of agonist and antagonist studies with peptide monomers and dimers. Monomers: G33, D815 and RP9; Dimers: D815-6aa-RP9 and D815-12aa-RP9.

[0128] FIG. 42: IGF-1 standard curve using FDC-P2 cells.

[0129] FIGS. 43A-43B: Peptide monomers identified from G33 and RP6 secondary libraries panned against IGF-1R (SEQ ID NOS:1262-1432). FIG. 43A shows peptides from G33 secondary library; FIG. 43B shows peptides from RP6 secondary library.

[0130] FIGS. 44A-44B: Peptide dimers identified from libraries panned against IR or IGF-1R (SEQ ID NOS:1433-1540). FIG. 44A shows dimer peptides panned against IR; FIG. 44B shows dimer peptides panned against IGF-1R.

[0131] FIG. 45: Results of heterogeneous time-resolved fluorometric assays showing the effect of recombinant peptide G33 (rG33) on the binding of biotinylated-recombinant human IGF-1 (b-rhIGF-1) to recombinant human IGF-1R (rhIGF-1R).

[0132] FIG. 46: Results of heterogeneous time-resolved fluorometric assays showing the effect of recombinant peptide D815 (rD815) on the binding of biotinylated-recombinant human IGF-1 (b-rhIGF-1) to recombinant human IGF-1R (rhIGF-1R).

[0133] FIG. 47: Results of heterogeneous time-resolved fluorometric assays showing the effect of recombinant peptide RP9 on the binding of biotinylated-recombinant human IGF-1 (b-rhIGF-1) to recombinant human IGF-1R (rhIGF-1R).

[0134] FIG. 48: Results of heterogeneous time-resolved fluorometric assay showing the effect of recombinant peptide D815-6-G33 on the binding of biotinylated-recombinant human IGF-1 (b-rhIGF-1) to recombinant human IGF-1R (rhIGF-1R).

[0135] FIG. 49: Results of heterogeneous time-resolved fluorometric assays showing the effect of recombinant peptide D815-6-RP9 on the binding of biotinylated-recombinant human IGF-1 (b-rhIGF-1) to recombinant human IGF-1R (rhIGF-1R).

[0136] FIG. 50: Results of heterogeneous time-resolved fluorometric assays showing the effect of recombinant peptide D815-12-RP9 on the binding of biotinylated-recombinant human IGF-1 (b-rhIGF-1) to recombinant human IGF-1R (rhIGF-1R).

[0137] FIG. 51: Results of heterogeneous time-resolved fluorometric assays showing the effect of IGF-1 on the binding of biotinylated-recombinant human IGF-1 (b-rhIGF-1) to recombinant human IGF-1R (rhIGF-1R).

[0138] FIG. 52: Results of time-resolved fluorescence resonance energy transfer assays showing the effect of Site 1 peptides, Site 2 peptides, and rhIGF-1 on the dissociation of biotinylated-20E2 (b-20E2, Site 1) from recombinant human IGF-1R.

[0139] FIG. 53: Results of time-resolved fluorescence resonance energy transfer assays showing the effect of various peptide monomers and dimers on the dissociation of biotinylated-20E2 (b-20E2, Site 1) from recombinant human IGF-1R.

[0140] FIGS. 54A-54B, 55A-55B, 56A-56B, 57A-57B, 58A-58B, 59A-59B, 60A-60C, 61A-61B, 62A-62B, 63A-63B, and 64A-64B: Amino acid sequences identified by panning peptide libraries against IGF-1R. The amino acids are represented by their one-letter abbreviation. The ratios over background are determined by dividing the signal at 405 nm (E-Tag, IGF-1R, or IR) by the signal at 405 nm for non-fat milk. The IGF-1R/IR ratio comparison is determined by dividing the ratio of IGF-1R by the ratio of IR. The IR/IGF-1R ratio comparison is determined by dividing the ratio of IR by the ratio of IGF-1R. Sp/Irr=the ratio of specific binding over non-specific binding; LDH=lactate dehydrogenase (negative control).

[0141] Where included, the design of each library is shown in the first line in bold. In the design, symbol ‘X’ indicates a random position, an underlined amino acid indicates a doped position at the nucleotide level, and other positions are held constant. Symbols in the listed sequences include: Q indicates a position corresponding to a TAG stop codon; # indicates a position corresponding to a TAA stop codon; * indicates a position corresponding to a TGA stop codon; and ? indicates an unknown amino acid. The Q residues represent translation read-through at TAG stop codons. All libraries were designed with the short FLAG® Epitope DYKD (SEQ ID NO:1545; Hopp et al., 1988, Bio/Technology 6:1205-1210) at the N-terminus of the listed sequence and an E-tag epitope (GAPVPYPDPLEPR; SEQ ID NO:XX) at the C-terminus.

[0142] FIGS. 54A-54B: Peptides identified from a RP6 secondary library panned against IGF-1R. The RP9 peptide is a Formula 1, Site 1 monomer.

[0143] FIGS. 55A-55B: Peptides identified from a RP9-NPB25 secondary library panned against IGF-1R. The RP9-NPB25 peptide is a Formula 2, Site 1 monomer with a 25 amino acid C-terminal extension.

[0144] FIGS. 56A-56B: Peptides identified from a RP30-IGF-NPB20 secondary library panned against IGF-1R. The RP30-IGF-NPB20 peptide is a Site 1, Formula 2 monomer with a 20 amino acid C-terminal extension.

[0145] FIGS. 57A-57B: Peptides identified from a NPB20-RP30-IGF secondary library panned against IGF-1R. The NPB20-RP30-IGF peptide is a Site 1, Formula 2 monomer with a 20 amino acid N-terminal extension.

[0146] FIGS. 58A-58B: Peptides identified from a D815 secondary library panned against IGF-1R. The D815 peptide is a Formula 6, Site 2 monomer.

[0147] FIGS. 59A-59B: Peptides identified from a RP6-D815 secondary library panned against IGF-1R. The RP6-D815 peptide is a Site 1-Site 2 dimer with no linker.

[0148] FIGS. 60A-60C: Peptides identified from a RP6-6aa-D815 secondary library panned against IGF-1R. The RP6-6aa-D815 peptide is a Site 1-Site 2 dimer with a 6 amino acid linker.

[0149] FIGS. 61A-61B: Peptides identified from a RP6-RP9 secondary library panned against IGF-1R. The RP6-RP9 peptide is a Site 1-Site 1 dimer with no linker.

[0150] FIGS. 62A-62B: Peptides identified from a RP6-6aa-RP9 secondary library panned against IGF-1R. The RP6-6aa-RP9 peptide is a Site 1-Site 1 dimer with a 6 amino acid linker.

[0151] FIGS. 63A-63B: Peptides identified from a D815-RP6 secondary library panned against IGF-1R. The D815-RP6 peptide is a Site 2-Site 1 dimer with no linker.

[0152] FIGS. 64A-64B: Peptides identified from a D815-6aa-RP6 secondary library panned against IGF-1R. The D815-6aa-RP6 peptide is a Site 2-Site 1 dimer with a 6 amino acid linker.

[0153] FIGS. 65A-65F: Dose related increase in cell proliferation of MiaPaCa and MCF-7 cells as measured in response to IGF-1, IGF-2, and insulin. Cells were treated with either IGF-1, IGF-2, or insulin. FIG. 65A: Results for MiaPaCa cells incubated with IGF-1; FIG. 65B: MiaPaCa cells incubated with IGF-2; FIG. 65C: MiaPaCa cells incubated with insulin; FIG. 65D: MCF-7 cells incubated with IGF-1; FIG. 65E: MCF-7 cells incubated with IGF-2; FIG. 65F: MCF-7 cells incubated with insulin.

[0154] FIGS. 66A-66C: Peptide RP33-IGF competes with IGF-1 binding for binding to IGF-1R and antagonizes receptor activity in cell-based assays. For competition experiments, the ALPHAScreen assay format was used (see below). For antagonism assays, RP33-IGF was added to cells, cells were incubated with IGF-1, and cell number was determined. FIG. 66A: Inhibition of IGF-1 binding as a function of RP33-IGF concentration. FIG. 66B: Antagonism of IGF-1R in MCF-7 cells by peptide RP33-IGF. FIG. 66C: Antagonism of IGF-1R in MiaPaCa cells by peptide RP33-IGF.

[0155] FIGS. 67A-67B: IGF-1 stimulates transient phosphorylation of IRS-1 in MCF-7 cells. Cells were stimulated with IGF-1 for 0, 2, 10, 30, 60 minutes and total protein was immunoprecipitated for each analysis. FIG. 67A: Western blot analysis of endogenous IRS-1; FIG. 67B: Western blot analysis of phosphorylated IRS-1; Lane 1: No addition; Lane 2: 2 minute time point; Lane 3: 10 minute time point; Lane 4: 30 minute time point; Lane 5: 60 minute time point.

[0156] FIGS. 68A-68B: Phosphorylation of IRS-1 in MCF-7 cells induced by IGF-1 is dose-dependant. Cells were exposed to increasing concentrations of IGF-1 and total protein was immunoprecipitated. Stimulation by 0.50 nM IGF-1 resulted in a sub-maximal level of phosphorylation that was consistently visualized in Western blot analysis. FIG. 68A: Western blot analysis of endogenous IRS-1; FIG. 68B: Western blot analysis of phosphorylated IRS-1; Lane 1: No addition; Lane 2: 0.05 nM IGF-1; Lane 3: 0.1 nM IGF-1; Lane 4: 5 nM IGF-1; Lane 5: 1 nM IGF-1; Lane 6: 0.5 nM IGF-1; Lane 7: 10 nM IGF-1; Lane 8: 50 nM IGF-1.

[0157] FIGS. 69A-69B: Blockade of IGF-1-induced phosphorylation of IRS-1 in MCF-7 cells by synthetic peptides RP6KK and RP33-IGF. Unrelated peptides KCB1 (VSIGECGGLRHHRVRELCLV; SEQ ID NO:XX) and DGI3-D1 (ECRWFRPWRCPGLLSTGGGR; SEQ ID NO:XX) were used as negative controls. FIG. 69A: Western blot analysis of expressed IRS-1; FIG. 69B: Western blot analysis of phosphorylated IRS-1. Lane 1: no addition; Lane 2: DGI3-D1; Lane 3: KCB1; Lane 4: IGF-1 plus DGI3-D1; Lane 5: IGF-1 plus KCB1; Lane 6: IGF-1 plus RP6KK; Lane 7: IGF-1 plus RP33-IGF; Lane 8: IGF-1.

[0158] FIGS. 70A-70C: Peptides RP54 and RP52 compete with IGF-1 for binding to IGF-1R, and act as antagonists in cell proliferation assays. For antagonism assays, RP54 or RP52 was added to cells, cells were incubated with IGF-1, and cell number was determined. FIG. 70A: Antagonism of IGF-1R by RP54 in MCF-7 cells; FIG. 70B: Antagonism of RP54 in MiaPaCa cells. FIG. 70C: Antagonism of IGF-1 by RP52 in MCF-7 cells.

[0159] FIGS. 71A-71F: Peptide monomers with IGF-1R agonist or antagonist activity in MCF-7 or MiaPaCa cell proliferation assays compete against IGF-1 for binding to IGF-1R. Potencies of peptide competition were determined using the AlphaScreen assay format (see below). FIG. 71A: RP60 peptide; FIG. 71B: RP48 peptide; FIG. 71C: sG33 peptide; FIG. 71D: C1 peptide; FIG. 71E: L-RP9ex peptide; FIG. 71F: 12-RP9ex peptide.

[0160] FIGS. 72A-72E: Peptide dimers with IGF-1R agonist activity in MCF-7 or MiaPaCa cell proliferation assays compete with IGF-1 for binding to IGF-1R. Potencies of peptide competition were determined using the AlphaScreen assay format (see below). FIG. 72A: rRP30-IGF-12-D112 peptide (Site 1-Site 1); FIG. 72B: rRP30-IGF-12-RP31-IGF peptide (Site 1-Site 2); FIG. 72C: rRP31-IGF-12-RP30-IGF peptide (Site 2-Site 1); FIG. 72D: rD112-12-RP30-IGF peptide (Site 1-Site 1); FIG. 72E: rD112-12-D112 peptide (Site 1-Site 1).

[0161] FIGS. 73A-73D: Peptide monomers with IGF-1R agonist activity in MCF-7 or MiaPaCa cell proliferation assays. FIG. 73A: RP60 peptide; FIG. 73B: RP48 peptide; FIG. 73C: G33 peptide; FIG. 73D: L-RP9ex peptide.

[0162] FIGS. 74A-74I: Peptide dimers with IGF-1R agonist activity in MCF-7 or MiaPaCa cell proliferation assays. FIG. 74A: RP30-IGF-12-D112 (Site 1-Site 1); FIG. 74B: RP30-IGF-12-RP31-IGF (Site 1-Site 2); FIG. 74C: RP31-IGF-12-RP30-IGF (Site 2-Site 1); FIG. 74D: D112-12-RP30-IGF (Site 1-Site 1); FIG. 74E: RP6-L-D8B12 (Site 1-Site 2); FIG. 74F: D8B12-12-RP9 (Site 2-Site 1); FIG. 74G: D112-12-D112 (Site 1-Site 1); FIG. 74H: RP9-12-RP9 (Site 1-Site 1); FIG. 741: RP9-L-RP6 (Site 1-Site 1).

### VII. DETAILED DESCRIPTION OF THE INVENTION

[0163] This invention relates to amino acid sequences comprising motifs that bind to the insulin receptor (IR) and/or insulin-like growth factor receptor (IGF-1R). In addition to binding to IR and/or IGF-1R, the amino acid sequences also possess either agonist, partial agonist or antagonist activity at IR or IGF-1R. In addition, the amino acid sequences bind to separate binding sites (Sites 1 or 2) on IR or IGF-1R.

[0164] Although capable of binding to IR or IGF-1R at sites which participate in conferring agonist or antagonist activity, the amino acid sequences are not based on the native insulin or IGF-1 sequences, nor do they reflect an obvious homology to any such sequences.

[0165] The amino acid sequences of the invention may be peptides, polypeptides, or proteins. These terms as used herein should not be considered limiting with respect to the size of the various amino acid sequences referred to herein and which are encompassed within this invention. Thus, any amino acid sequence comprising at least one of the IR or IGF-1R binding motifs disclosed herein, and which binds to IR or IGF-1R is within the scope of this invention. In preferred embodiments, the amino acid sequences confer insulin or IGF-1 agonist or antagonist activity. The amino acid sequences of the invention are typically artificial, i.e., non-naturally occurring peptides, polypeptides, or fragments thereof. The amino acid sequences of the invention do not include insulin, insulin-like growth factors, antibodies against insulin receptors or insulin-like growth factor receptors, or fragments thereof. Amino acid sequences useful in the invention may be obtained through various means such as chemical synthesis, phage display, cleavage of proteins or polypeptides into fragments, or by any means which amino acid sequences of sufficient length to possess binding ability may be made or obtained.

[0166] The amino acid sequences provided by this invention should have an affinity for IR sufficient to provide adequate binding for the intended purpose. Thus, for use as a therapeutic, the peptide, polypeptide, or protein provided by this invention should have an affinity (K_{d}) of between about 10⁻⁷ to about 10⁻¹⁵ M. More preferably the affinity is 10⁻⁸ to about 10⁻¹² M. Most preferably, the affinity is 10⁻¹⁰ to about 10⁻¹² M. For use as a reagent in a competitive binding assay to identify other ligands, the amino acid sequence preferably has affinity for the receptor of between about 10⁻⁵ to about 10⁻¹² M.

[0167] The present invention describes several different binding motifs, which bind to active sites on IR or IGF-1R. The binding motifs are defined based on the analysis of several different amino acid sequences and analyzing the frequency that particular amino acids or types of amino acids occur at a particular position of the amino acid sequence as described in the related applications of Beasley et al. International Application PCT/US00/08528, filed Mar. 29, 2000, and Beasley et al., U.S. application Ser. No. 09/538,038, filed Mar. 29, 2000.

[0168] Also included within the scope of this invention are amino acid sequences containing substitutions, additions, or deletions based on the teachings disclosed herein and which bind to IR or IGF-1R with the same or altered affinity. For example, sequence tags (e.g., FLAG® tags) or amino acids, such as one or more lysines, can be added to the peptide sequences of the invention (e.g., at the N-terminal or C-terminal ends) as described in detail herein. Sequence tags can be used for peptide purification or localization. Lysines can be used to increase peptide solubility or to allow for biotinylation. Alternatively, amino acid residues located at the carboxy and amino terminal regions of the consensus motifs described below, which comprise sequence tags (e.g., FLAG® tags), or which contain amino acid residues that are not associated with a strong preference for a particular amino acid, may optionally be deleted providing for truncated sequences. Certain amino acids (e.g., C-terminal or N-terminal residues) such as lysine which promote the stability or biotinylation of the amino acids sequences may be deleted depending on the use of the sequence, as for example, expression of the sequence as part of a larger sequence which is soluble, or linked to a solid support.

[0169] Peptides that bind to IR or IGF-1R, and methods and kits for identifying such peptides, have been disclosed by Beasley et al., International Application PCT/US00/08528 filed Mar. 29, 2000 and Beasley et al., U.S. application Ser. No. 09/538,038 filed Mar. 29, 2000, which are incorporated by reference in their entirety.

[0170] A. Consensus Motifs

[0171] The following motifs have been identified as conferring binding activity to IR and/or IGF-1R:

[0172] 1. X₁X₂X₃X₄X₅ (Formula 1; Group 1; the A6 motif) wherein X_{1,} X_{2,} X₄ and X₅ are aromatic amino acids, preferably, phenylalanine or tyrosine. Most preferably, X₁ and X₅ are phenylalanine and X₂ is tyrosine. X₃ may be any small polar amino acid, but is preferably selected from aspartic acid, glutamic acid, glycine, or serine, and is most preferably aspartic acid or glutamic acid. X₄ is most preferably tryptophan, tyrosine, or phenylalanine and most preferably tryptophan. Particularly preferred embodiments of the A6 motif are FYDWF (SEQ ID NO:1554) and FYEWF (SEQ ID NO:1555). The A6 motif possesses agonist activity at IGF-1R, but agonist or antagonist activity at IR depending on the identity of amino acids flanking A6. See FIG. 5A.

[0173] Amino acid sequences that comprise the A6 motif and possess agonist activity at IR, include but are not limited to, D117/H2C: FHENFYDWFVRQVSKK (SEQ ID NO:1556); D117/H2 minus terminal lysines: FHENFYDWFVRQVS (SEQ ID NO:1557); RP9: GSLDESFYDWFERQLGKK (SEQ ID NO:1558); RP9 minus terminal lysines: GSLDESFYDWFERQLG (SEQ ID NO:1559); and S175: GRVDWLQRNANFYDWFVAELG (SEQ ID NO:1560). Preferred RP9 sequences include GLADEDFYEWFERQLR (SEQ ID NO:1561), GLADELFYEWFDRQLS (SEQ ID NO:1562), GQLDEDFYEWFDRQLS (SEQ ID NO:1563), GQLDEDFYAWFDRQLS (SEQ ID NO:1564), GFMDESFYEWFERQLR (SEQ ID NO:1565), GFWDESFYAWFERQLR (SEQ ID NO:1566), GFMDESFYAWFERQLR (SEQ ID NO:1567), and GFWDESFYEWFERQLR (SEQ ID NO:1568). Non-limiting examples of Group 1 (Formula 1; A6) amino acid sequences are shown in FIGS. 1A-1O.

[0174] 2. X₆X₇X₈X₉X₁₀X₁₁X₁₂X₁₃ (Formula 2, Group 3; the B6 motif) wherein X₆ and X₇ are aromatic amino acids, preferably, phenylalanine or tyrosine. Most preferably, X₆ is phenylalanine and X₇ is tyrosine. X_{8,} X_{9,} X_{11,} and X₁₂ may be any amino acid. X₁₀ and X₁₃ are hydrophobic amino acids, preferably leucine, isoleucine, phenylalanine, tryptophan or methionine, but more preferably leucine or isoleucine. X₁₀ is most preferably isoleucine for binding to IR and leucine for binding to IGF-1R. X₁₃ is most preferably leucine. Amino acid sequences of Formula 2 may function as an antagonist at the IGF-1R, or as an agonist at the IR. Preferred consensus sequences of the Formula 2 motif are FYX₈X₉LX₁₁X₁₂L (SEQ ID NO:1569), FYX₈X₉IX₁₁X₁₂L (SEQ ID NO:1570), FYX₈AIX₁₁X₁₂L (SEQ ID NO:1571), and FYX₈YFX₁₁X₁₂L (SEQ ID NO:1572).

[0175] Another Formula 2 motif for use with this invention comprises FYX₈Y FX₁₁X₁₂L (SEQ ID NO:1573) and is shown as Formula 2A (“NNRP”) below: X₁₁₅X₁₁₆X₁₁₇X₁₁₈FYX₈YFX₁₁X₁₂LX₁₁₉X₁₂₀X₁₂₁X₁₂₂ (SEQ ID NO:1574) wherein X₁₁₅-X₁₁₈ and X₁₁₈-X₁₂₂ may be any amino acid which allows for binding to IR or IGF-1R. X₁₁₅ is preferably selected from the group consisting of tryptophan, glycine, aspartic acid, glutamic acid, and arginine. Aspartic acid, glutamic acid, glycine, and arginine are more preferred. Tryptophan is most preferred. The preference for tryptophan is based on its presence in clones at a frequency three to five fold higher than that expected over chance for a random substitution, whereas aspartic acid, glutamic acid and arginine are present about two fold over the frequency expected for random substitution.

[0176] X₁₁₆ preferably is an amino acid selected from the group consisting of aspartic acid, histidine, glycine, and asparagine. X₁₁₇ and X₁₁₈ are preferably glycine, aspartic acid, glutamic acid, asparagine, or alanine. More preferably X₁₁₇ is glycine, aspartic acid, glutamic acid and asparagine whereas X₁₁₈ is more preferably glycine, aspartic acid, glutamic acid or alanine. X₈ when present in the Formula 2A motif is preferably arginine, glycine, glutamic acid, or serine. X₁₁ when present in the Formula 2A motif is preferably glutamic acid, asparagine, glutamine, or tryptophan, but most preferably glutamic acid. X₁₂ when present in the Formula 2A motif is preferably aspartic acid, glutamic acid, glycine, lysine or glutamine, but most preferably aspartic acid. X₁₁₉ is preferably glutamic acid, glycine, glutamine, aspartic acid or alanine, but most preferably glutamic acid. X₁₂₀ is preferably glutamic acid, aspartic acid, glycine or glutamine, but most preferably glutamic acid. X₁₂₁ is preferably tryptophan, tyrosine, glutamic acid, phenylalanine, histidine, or aspartic acid, but most preferably tryptophan or tyrosine. X₁₂₂ is preferably glutamic acid, aspartic acid or glycine; but most preferably glutamic acid. Preferred amino acid residue are identified based on their frequency in clones over two fold over that expected for a random event, whereas the more preferred sequences occur about 3-5 times as frequently as expected.

[0177] In certain cases, Formula 1 and Formula 2 amino acid sequences may also include two cysteine residues, which may be positioned either outside or inside the motif sequence (e.g., X₁ X₂ X₃ X₄ X₅ and X₆X₇X₈X₉X₁₀X₁₁X₁₂X₁₃), as described herein. The spacing between the cysteine residues preferably may vary from 3 amino acids, e.g., RP62 (CDFYCALSRLSGQPRDRMPNYPGTS; SEQ ID NO:XX) up to 19 amino acids, e.g., RP35 (DRDFCRFYERLTALVGGQVDGGWPC; SEQ ID NO:XX). Formula 1 and Formula 2 peptides may exhibit varying size and cysteine positioning. For example, Formula 2 peptide RP6 (TFYSCLASLLTGTPQPNRGPWERCR; SEQ ID NO:XX) and derivatives, RP30-IGF, RP33-IGF, include two cysteine residues separated by 18 amino acids. In contrast, Formula 1 peptide G33 (GIISQSCPESFYDWFAGQVSDPWWCW; SEQ ID NO:XX) includes two cysteines separated by 17 amino acid residues. In certain Formula and Formula 2 peptides, the position and spacing of the cysteine residues was found to be highly preferred in these peptides as determined by calculations of amino acid preferences from peptides obtained by biopanning of RP6 and G33 secondary libraries. Without wishing to be bound by theory, it is possible that the cysteine pairs observed in Formula 1 and Formula 2 amino acid sequences form cysteine loop structures.

[0178] 3. X₁₄X₁₅X₁₆X₁₇X₁₈X₁₉X₂₀X₂₁ (Formula 3, reverse B6, revB6), wherein X₁₄ and X₁₇ are hydrophobic amino acids; X_{14,} X₁₇ are preferably leucine, isoleucine, and valine, but most preferably leucine; X_{15,} X_{16,} X₁₈ and X₁₉ may be any amino acid; X₂₀ is an aromatic amino acid, preferably tyrosine or histidine, but most preferably tyrosine; and X₂₁ is an aromatic amino acid, but preferably phenylalanine or tyrosine, and most preferably phenylalanine. For use as an IGF-1R binding ligand, an aromatic amino acid is strongly preferred at X₁₈.

[0179] 4. X₂₂X₂₃X₂₄X₂₅X₂₆X₂₇X₂₈X₂₉X₃₀X₃₁X₃₂X₃₃X₃₄X₃₅X₃₆X₃₇X₃₈X₃₉X₄₀X₄₁ (Formula 4; Group 7; the F8 motif) wherein X_{22,} X_{25,} X_{26,} X_{28,} X_{29,} X_{30,} X_{33,} X_{34,} X_{35,} X_{36,} X_{37,} X_{38,} X_{40,} and X₄₁ are any amino acid. X₃₅ and X₃₇ may be any amino acid when the F8 motif is used as an IR binding ligand or as a component of an IR binding ligand, however for use as an IGF-1R binding ligand, glycine is strongly preferred at X₃₇ and a hydrophobic amino acid, particularly, leucine, is preferred at X₃₅ X₂₃ is a hydrophobic amino acid. Methionine, valine, leucine or isoleucine are preferred amino acids for X_{23,} however, leucine which is most preferred for preparation of an IGF-1R binding ligand is especially preferred for preparation of an IR binding ligand. At least one cysteine is located at X₂₄ through X_{27,} and one at X₃₉ or X₄₀. Together the cysteines are capable of forming a cysteine cross-link to create a looped amino acid sequence. In addition, although a spacing of 14 amino acids in between the two cysteine residues is preferred, other spacings may also be used provided binding to IGF-1R or IR is maintained. Accordingly, other amino acids may be substituted for the cysteines at positions X₂₄ and X₃₉ if the cysteines occupy other positions.

[0180] In one embodiment, for example, the cysteine at position X₂₄ may occur at position X₂₇ which will produce a smaller loop provided that the cysteine is maintained at position X₃₉. These smaller looped peptides are described herein as Formula 5, infra. X₂₇ is any polar amino acid, but is preferably selected from glutamic acid, glutamine, aspartic acid, asparagine, or as discussed above cysteine. The presence of glutamic acid at position X₂₇ decreases binding to IR but has less of an effect on binding to IGF-1R. X₃₁ is any aromatic amino acid and X₃₂ is any small amino acid. For binding to IGF-1R, glycine or serine is preferred at position X_{31,} however, tryptophan is highly preferred for binding to IR. At position X_{32,} glycine is preferred for both IGF-1R and IR binding. X₃₆ is an aromatic amino acid. A preferred consensus sequence for F8 is X₂₂LCX₂₅X₂₆EX₂₈X₂₉X₃₀WGX₃₃X₃₄X₃₅ X₃₆X₃₇X₃₈CX₄₀X₄₁ (SEQ ID NO:1575) whereas the amino acids are defined above. A more preferred F8 sequence is HLCVLEELFWGASLFGYCSG (“F8”; SEQ ID NO:1576). Amino acid sequences comprising the F8 sequence motif preferably bind to IR over IGF-1R. FIGS. 2A-2E list non-limiting examples of Formula 4 amino acid sequences.

[0181] 5. X₄₂X₄₃X₄₄X₄₅X₄₆X₄₇X₄₈X₄₉X₅₀X₅₁X₅₂X₅₃X₅₄X₅₅X₅₆X₅₇X₅₈X₅₉X₆₀X₆₁ (Formula 5; mini F8 motif) wherein X_{42,} X_{43,} X_{44,} X_{45,} X_{53,} X_{55,} X_{56,} X_{58,} X_{60,} and X₆₁ are any amino acid. X_{43,} X_{46,} X_{49,} X_{50,} and X₅₄ are hydrophobic amino acids, however, X₄₃ and X₄₆ are preferably leucine, whereas X₅₀ is preferably phenylalanine or tyrosine but most preferably phenylalanine. X₄₇ and X₅₉ are cysteines. X₄₈ is preferably a polar amino acid, i.e., aspartic acid or glutamic acid, but most preferably glutamic acid. Use of the small amino acid at position 54 may confer IGF-1R specificity. X_{51,} X_{52,} and X₅₇ are small amino acids, preferably glycine. A preferred consensus sequence for mini F8 is X₄₂X₄₃X₄₄X₄₅LCEX₄₉FGGX₅₃ X₅₄X₅₅X₅₆G X₅₈CX₆₀X₆₁ (SEQ ID NO:1577). Amino acid sequences comprising the sequence of Formula 5 preferably bind to IGF-1R or IR.

[0182] 6. X₆₂X₆₃X₆₄X₆₅X₆₆X₆₇X₆₈X₆₉X₇₀X₇₁X₇₂X₇₃X₇₄X₇₅X₇₆X₇₇X₇₈X₇₉X₈₀ X₈₁ (Formula 6; Group 2; the D8 motif) wherein X_{62,} X_{65,} X_{68,} X_{69,} X_{71,} X_{73,} X_{76,} X_{77,} X_{78,} X_{80,} and X₈₁ may be any amino acid. X₆₆ may also be any amino acid, however, there is a strong preference for glutamic acid. Substitution of X₆₆ with glutamine or valine may result in attenuation of binding. X_{63,} X_{70,} and X₇₄ are hydrophobic amino acids. X₆₃ is preferably leucine, isoleucine, methionine, or valine, but most preferably leucine. X₇₀ and X₇₄ are preferably valine, isoleucine, leucine, or methionine. X₇₄ is most preferably valine. X₆₄ is a polar amino acid, more preferably aspartic acid or glutamic acid, and most preferably glutamic acid. X₆₇ and X₇₅ are aromatic amino acids. Whereas tryptophan is highly preferred at X_{67,} X₇₅ is preferably tyrosine or tryptophan but most preferably tyrosine. X₇₂ and X₇₉ are cysteines that again are believed to form a loop which position amino acid may be altered by shifting the cysteines in the amino acid sequence.

[0183] D8 is most useful as an amino acid sequence having a preference for binding to IR as only a few D8 sequences capable of binding to IGF-1R over background have been detected. A preferred sequence for binding to IR is X₆₂LX₆₄X₆₅X₆₆WX₆₈X₆₉X₇₀X₇₁CX₇₃X₇₄X₇₅X₇₆X₇₇X₇₈CX₈₀X₈₁ (SEQ ID NO:1578). Examples of specific peptide sequences comprising this motif include D8: KWLDQEWAWVQCEVYGRGCPSKK (SEQ ID NO:1579); and D8 minus terminal lysines: KWLDQEWAWVQCEVYGRGCPS (SEQ ID NO:1580). Preferred D8 monomer sequences include SLEEEWAQIQCEIYGRGCRY (SEQ ID NO:1581) and SLEEEWAQIQCEIWGRGCRY (SEQ ID NO:1582). Preferred D8 dimer sequences include SLEEEWAQIECEVYGRGCPS (SEQ ID NO:1583), and SLEEEWAQIECEVWGRGCPS (SEQ ID NO:1584). Non-limiting examples of Group 2 (Formula 6; D8) amino acid sequences are shown in FIGS. 3A-3E.

[0184] 7. HX₈₂X₈₃X₈₄X₈₅X₈₆X₈₇X₈₈X₈₉X₉₀X₉₁X₉₂ (Formula 7) wherein X₈₂ is proline or alanine but most preferably proline; X₈₃ is a small amino acid more preferably proline, serine or threonine and most preferably proline; X₈₄ is selected from leucine, serine or threonine but most preferably leucine; X₈₅ is a polar amino acid preferably glutamic acid, serine, lysine or asparagine but more preferably serine; X₈₆ may be any amino acid but is preferably a polar amino acid such as histidine, glutamic acid, aspartic acid, or glutamine; X₈₇ is an aliphatic amino acid preferably leucine, methionine or isoleucine and most preferably leucine; amino acid X_{88,} X₈₉ and X₉₀ may be any amino acids; X₉₁ is an aliphatic amino acid with a strong preference for leucine as is X₉₂. Phenylalanine may also be used at position 92. A preferred consensus sequence of Formula 7 is HPPLSX₈₆LX₈₈X₈₉X₉₀LL (SEQ ID NO:1585). The Formula 7 motif binds to IR with little or no binding to IGF-1R.

[0185] 8. Another sequence is X₁₀₄X₁₀₅X₁₀₆X₁₀₇X₁₀₈X₁₀₉X₁₁₀X₁₁₁X₁₁₂X₁₁₃ X₁₁₄ (Formula 8) which comprises eleven amino acids wherein at least one, and preferably two of the amino acids of X₁₀₆ through X₁₁₁ are tryptophan. In addition, it is also preferred that when two tryptophan amino acids are present in the sequence they are separated by three amino acids, which are preferably, in sequential order proline, threonine and tyrosine with proline being adjacent to the tryptophan at the amino terminal end. Accordingly, the most preferred sequence for X₁₀₇X₁₀₈X₁₀₉X₁₁₀X₁₁₁ is WPTYW (SEQ ID NO:1586). At least one of the three amino acids on the amino terminal (X_{104,} X_{105,} X₁₀₆) and at least one of the amino acids carboxy terminal (X_{112,} X_{113,} X₁₁₄) ends immediately flanking X₁₀₇-X₁₁₁ are preferably a cysteine residue, most preferably at X₁₀₅ and X₁₁₃ respectively. Without being bound by theory, the cysteines are preferably spaced so as to allow for the formation of a loop structure. X₁₀₄ and X₁₁₄ are both small amino acids such as, for example, alanine and glycine. Most preferably, X₁₀₄ is alanine and X₁₁₄ is glycine. X₁₀₅ may be any amino acid but is preferably valine. X₁₁₂ is preferably asparagine. Thus, the most preferred sequence is ACVWPTYWNCG (SEQ ID NO:1587).

[0186] 9. An amino acid sequence comprising JBA5: DYKDLCQSWGVRIGWLAGLCPKK (SEQ ID NO:1541); or JBA5 without terminal lysines: LCQSWGVRIGWLAGLCP (SEQ ID NO:1542) (Formula 9). The Formula 9 motif is another motif believed to form a cysteine loop that possesses agonist activity at both IR and IGF-1R. Although IR binding is not detectable by ELISA, binding of Formula 9 to IR is competed by insulin and is agonistic.

[0187] 10. W X₁₂₃ G Y X₁₂₄ W X₁₂₅ X₁₂₆ (SEQ ID NO:1543) (Formula 10; Group 6) wherein X₁₂₃ is selected from proline, glycine, serine, arginine, alanine or leucine, but more preferably proline; X₁₂₄ is any amino acid, but preferably a charged or aromatic amino acid; X₁₂₅ is a hydrophobic amino acid preferably leucine or phenylalanine, and most preferably leucine. X₁₂₆ is any amino acid, but preferably a small amino acid. In one embodiment of the present invention, the Formula 10, Group 6 motif is WPGY (SEQ ID NO:1588). Examples of specific peptide sequences comprising this motif include E8: KVRGFQGGTVWPGYEWLRNAAKK (SEQ ID NO:1589); and E8 minus terminal lysines: KVRGFQGGTVWPGYEWLRNM (SEQ ID NO:1590). Preferred Group 6 sequences include WAGYEWF (SEQ ID NO:1591), WEGYEWL (SEQ ID NO:1592), WAGYEWL (SEQ ID NO:1593), WEGYEWF (SEQ ID NO:1594), and DSDWAGYEWFEEQLD (SEQ ID NO:1595). Non-limiting examples of Group 6 amino acid sequences are shown in FIGS. 4A-4B.

[0188] The IR and IGF-1R binding activities of representative Group 1 (Formula 1; A6); Group 2 (Formula 6; D8); and Group 6 (Formula 10); and Group 7 (Formula 4; F8) amino acid sequences are summarized in FIGS. 8 and 9A-9B. Group 1 (Formula 1; A6) amino acid sequences contain the consensus sequence FyxWF (SEQ ID NO:1596), which is typically agonistic in cell-based assays. Group 2 (Formula 6; D8) amino acid sequences are composed of two internal sequences having a consensus sequence VYGR (SEQ ID NO:1597) and two cysteine residues each. Thus, Group 2 peptides are capable of forming a cyclic peptide bridged with a disulfide bond. Neither of these consensus sequences have any significant linear sequence similarities greater than 2 or 3 amino acids with mature insulin. Group 7 (Formula 4; F8) amino acid sequences are composed of two internal exemplary sequences which do not have any significant sequence homology, but have two cysteine residues 13-14 residues apart, thus being capable of forming a cyclic peptide with a long loop anchored by a disulfide bridge.

[0189] B. Amino and Carboxyl Terminal Extensions Modulate Activity of Motifs

[0190] In addition to the motifs stated above, the invention also provides preferred sequences at the amino terminal or carboxyl terminal ends which are capable of enhancing binding of the motifs to either IR, IGF-1R, or both. In addition, the use of the extensions described below does not preclude the possible use of the motifs with other substitutions, additions or deletions that allow for binding to IR, IGF-1R, or both.

[0191] 1. Formula 1

[0192] Any amino acid sequence may be used for extensions of the amino terminal end of A6, although certain amino acids in amino terminal extensions may be identified which modulate activity. Preferred carboxy terminal extensions for A6 are A6-X₉₃X₉₄X₉₅X₉₆X₉₇ wherein X₉₃ may be any amino acid, but is preferably selected from the group consisting of alanine, valine, aspartic acid, glutamic acid, and arginine, and X₉₄ and X₉₇ are any amino acid; X₉₅ is preferably glutamine, glutamic acid, alanine or lysine but most preferably glutamine. The presence of glutamic acid at X₉₅ however may confer some IR selectivity. Further, the failure to obtain sequences having an asparagine or aspartic acid at position X₉₅ may indicate that these amino acids should be avoided to maintain or enhance sufficient binding to IR and IGF-1R. X₉₆ is preferably a hydrophobic or aliphatic amino acid, more preferably leucine, isoleucine, valine, or tryptophan but most preferably leucine. Hydrophobic residues, especially tryptophan at X₉₆ may be used to enhance IR selectivity.

[0193] 2. Formula 2

[0194] B6 with amino terminal and carboxy terminal extensions may be represented as X₉₈X₉₉-B6-X₁₀₀. X₉₈ is optionally aspartic acid and X₉₉ is independently an amino acid selected from the group consisting of glycine, glutamine, and proline. The presence of an aspartic acid at X₉₈ and a proline at X₉₉ is associated with an enhancement of binding for both IR and IGF-1R. A hydrophobic amino acid is preferred for the amino acid at X_{100,} an aliphatic amino acid is more preferred. Most preferably leucine, for IR and valine for IGF-1R. Negatively charged amino acids are preferred at both the amino and carboxy terminals of Formula 2A.

[0195] 3. Formula 3

[0196] An amino terminal extension of Formula 3 defined as X₁₀₁X₁₀₂X₁₀₃-revB6 wherein X₁₀₃ is a hydrophobic amino acid, preferably leucine, isoleucine or valine, and X₁₀₂ and X₁₀₁ are preferably polar amino acids, more preferably aspartic acid or glutamic acid may be useful for enhancing binding to IR and IGF-1R. No preference is apparent for the amino acids at the carboxy terminal end of Formula 3.

[0197] 4. Formula 10

[0198] In one preferred embodiment, Formula 10 sequences WX₁₂₃GYX₁₂₄WX₁₂₅X₁₂₆ (SEQ ID NO:1543) can include an amino terminal extension comprising the sequence DSD and/or a carboxy terminal extension comprising the sequence EQLD (SEQ ID NO:1598).

[0199] C. IR Binding Preferences

[0200] As indicated above, the amino acid sequences containing the motifs of this invention may be constructed to have enhanced selectivity for either IR or IGF-1R by choosing appropriate amino acids at specific positions of the motifs or the regions flanking them. By providing amino acid preferences for IR or IGF-1R, this invention provides the means for constructing amino acid sequences with minimized activity at the non-cognate receptor. For example, the amino acid sequences disclosed herein with high affinity and activity for IR and low affinity and activity for IGF-1R are desirable as IR agonist as their propensity to promote undesirable cell proliferation, an activity of IGF-1 agonists, is reduced. Ratios of IR binding affinity to IGF-1R binding affinity for specific sequences are provided in FIGS. 1A-1O; 2A-2E; 3A-3E; 4A-4I; 44A-44B. As an insulin therapeutic, the IR/IGF-1R binding affinity ratio is preferably greater than 100. Conversely, for use as an IGF-1R therapeutic, the IR/IGF-1R ratio should be less than 0.01. Examples of peptides that selectively bind to IGF-1R are shown below.

TABLE 1

IGF-1R-SELECTIVE SEQUENCES

| | | |
|---|---|---|
| | Ratios over Back- | |
| SEQ ID | ground | Comparisons |

| | | | | | | | |
|---|---|---|---|---|---|---|---|
| Clone | NO: | Sequence | E-Tag | IGF-1R | IR | IGF-1R/IR | IR/IGF-1R |

FORMULA 1 (Group 1; A6-like):

| | | | | | | | |
|---|---|---|---|---|---|---|---|
| A6L-0-E6-IR | 1599 | YRGMLVLGRSSDGAGKVAFERPARIGQTVFAVNFYDWFV | 31.0 | 31.0 | 1.8 | 17.0 | 0.1 |
| H2CA-4-G9-IGFR | 1600 | GIISQSCPESFYDWFAGQVSDPWWCW | 8.6 | 9.5 | 0.6 | 16.0 | 0.1 |
| H2CA-4-H6-IGFR | 1601 | VGRASGFPENFYDWFGRQLSLQSGEQ | 4.9 | 10.5 | 0.7 | 14.6 | 0.1 |
| A6L-0-E4-IR | 1602 | YRGMLVLGRISDGAG#VASEPPARIGRKVFAVNFYDWFV | 26.0 | 16.0 | 1.3 | 13.0 | 0.1 |
| A6L-0-H3-IR | 1603 | YRGMLVLGRISGGAGKAASERPARIGQKVSAVNFYDWFV | 27.0 | 26.0 | 2.0 | 13.0 | 0.1 |
| H2CA-4-F5-IGFR | 1604 | VGYQGQGDENFYDWFIRQVSGRLGVQ | 5.5 | 9.7 | 0.8 | 12.3 | 0.1 |
| H2CA-4-H8-IGFR | 1605 | SACQFDCHENFYDWFARQVSGGAAYG | 5.6 | 9.2 | 1.0 | 9.4 | 0.1 |
| H2CA-4-F11-IGFR | 1606 | SAAQLFFQESFYDWFLRQVAESSQPN | 3.5 | 6.8 | 1.0 | 6.7 | 0.1 |
| H2CA-4-F6-IGFR | 1607 | AVRATRFDEAFYDWFVRQISDGQGNK | 3.9 | 7.3 | 1.1 | 6.4 | 0.2 |
| H2CA-4-F10-IGFR | 1608 | VNQSGSIHENFYDWFERQVSHQRGVR | 4.9 | 5.7 | 1.0 | 5.9 | 0.2 |
| H2CA-1-A3-IGFR | 1609 | APDPSDFQEIFYDWFVRQVSRMPGGG | 7.7 | 3.8 | 0.8 | 5.1 | 0.2 |
| H2CA-3-C8-IGFR | 1610 | SSCDGAGHESFYEWFVRQVSGCRSV | 15.1 | 5.6 | 1.2 | 4.8 | 0.2 |
| H2CA-2-B9-IGFR | 1611 | RAGSSDFHEDFYEWFVRQVSLSLKGK | 9.3 | 7.0 | 1.7 | 4.2 | 0.2 |
| H2CA-4-H4-IGFR | 1612 | QAVQPGFHEEFYDWFVRQVSTGVGGG | 3.9 | 4.1 | 1.0 | 4.2 | 0.2 |
| E4Dα-4-H2-IR | 1613 | GFREGNFYEWFQAQVT | 37.8 | 33.9 | 8.2 | 4.1 | 0.2 |
| H2CA-4-F7-IGFR | 1614 | SSIGGGEHENFYDWFSRQLSQSPPLK | 1.5 | 3.2 | 0.8 | 4.1 | 0.2 |
| H2CA-3-D6-IGFR | 1615 | QSPVGSSHEDFYDWFFRQVAQSGAHQ | 8.3 | 9.0 | 2.2 | 4.0 | 0.3 |
| H2CA-3-D8-IGFR | 1616 | NYRRQVFNGNFYDWFDRQVFSLVTPG | 10.9 | 7.2 | 1.8 | 4.0 | 0.3 |
| H2CA-4-G11-IGFR | 1617 | TLDGGSFEEQFYDWFVRQLSYRTNPD | 10.8 | 9.5 | 2.5 | 3.9 | 0.3 |
| H2CA-4-F1-IGFR | 1618 | FYVQQWGHENFYDWFDRQVSQSGGAG | 5.8 | 3.5 | 0.9 | 3.8 | 0.3 |
| H2CA-3-D7-IGFR | 1619 | LRRQAPVEENFYDWFVRQVSGDRVGG | 13.3 | 3.0 | 0.8 | 3.7 | 0.3 |
| H2CA-1-A7-IGFR | 1620 | RCGRELYHSTFYDWFDRQVAGRTCPS | 8.0 | 2.2 | 0.6 | 3.7 | 0.3 |
| H2CA-2-B4-IGFR | 1621 | CCLLCRFQQNFYDWFVCQGISRLRPL | 3.5 | 4.1 | 1.1 | 3.6 | 0.3 |
| H2CA-2-B3-IGFR | 1622 | PPLASDLDVQFYGWFVQQVSPPGRGG | 7.7 | 3.8 | 1.0 | 3.6 | 0.3 |
| H2CA-2-B2-IGFR | 1623 | GAPVDQLHEDFYDWFVRQVSQAATG | 4.1 | 3.4 | 1.0 | 3.5 | 0.3 |
| E4Dα-2-D11-IR | 1624 | GFREGSFYDWFQAQVT | 40.2 | 11.1 | 3.3 | 3.4 | 0.3 |
| 20E2Bβ-4-G6-IR | 1625 | SQAGSAFYAWFDQVLRTVHSA | 22.4 | 6.2 | 1.9 | 3.3 | 0.3 |
| H2CA-4-H9-IGFR | 1626 | RGAVAGFHDQFYDWFDRQVSRVHKFG | 8.7 | 5.6 | 1.9 | 3.0 | 0.3 |
| H2CA-2-B11-IGFR | 1627 | AICDAGFHEHFYDWFALQVSDCGRQS | 11.9 | 4.6 | 1.6 | 3.0 | 0.3 |
| H2CA-3-E8-IGFR | 1628 | LGYQEPFQQNFYDWFVRQVSGAENAG | 13.2 | 6.3 | 2.2 | 2.9 | 0.3 |
| A6S-2-D11-IR | 1629 | EAASLGSQDRNFYDWFVRQVV | 48.4 | 37.4 | 13.5 | 2.8 | 0.4 |
| A6S-2-D1-IR | 1630 | VERSASSQDGNFYDWFVVQIR | 37.8 | 30.6 | 12.0 | 2.6 | 0.4 |
| A6S-3-E2-IR | 1631 | TSEVQRRSQDNFYDWFVAQVA | 33.1 | 24.7 | 9.8 | 2.5 | 0.4 |
| H2CA-3-E11-IGFR | 1632 | HLADGQFHEKFYDWFERQISSRCNDC | 4.7 | 2.2 | 1.0 | 2.2 | 0.5 |
| H2CA-3-C11-IGFR | 1633 | FRTLAAQHDSFYDWFDRQVSGAAGER | 9.3 | 3.3 | 1.6 | 2.1 | 0.5 |
| A6-PD1-IGFR | 1634 | SFHEDFYDWFDRQVSGSLKK | | | | | |
| H2C-PD1-IGFR(RP9) | 1558 | GSLDESFYDWFERQLGKK | | | | | |

FORMULA 2 (Group 2; B6-like):

| | | | | | | | |
|---|---|---|---|---|---|---|---|
| 20C-3-G3-IGFR | 1635 | TFYSCLASLLTGTPQPNRGPWERCR | 33.1 | 32.3 | 1.2 | 27.0 | <0.1 |
| 20C-4-C7-IGFR | 1636 | FFYDCLAALLQGVARYHDLCAVEIT | 35.3 | 28.0 | 1.3 | 21.8 | <0.1 |
| B6Hα-1-B5-IR | 1637 | CCTTEMVVMDARDDPFYHKLSELVTGG | 41.5 | 20.5 | 1.0 | 20.5 | 0.0 |
| R20β-4-A6-IR | 1638 | RGQSDAFYSGLWALIGLSDG | 9.3 | 25.9 | 1.5 | 17.3 | 0.1 |
| 20E2B-1-A6-IGFR | 1639 | GVRAMSFYDALVSVLGLGPSG | 18.6 | 18.1 | 1.1 | 16.8 | 0.1 |
| R20α-4-20A12-IR | 1640 | RLFYCGIQALGANLGYSGCV | 48.6 | 39.9 | 2.4 | 16.6 | 0.1 |
| 20E2Bβ-4-G7-IR | 1641 | LQPCSGFYECIERLIGVKLSG | 19.9 | 25.2 | 1.6 | 15.8 | 0.1 |
| NNRPγ-4-B11-IR | 1642 | LKDGFYDYFWQRLHLGS | 4.1 | 18.7 | 1.2 | 15.5 | 0.1 |
| 20E2B-3-C6-IGFR | 1643 | VEGRGLFYDLLRQLLARRQNG | 17.9 | 16.8 | 1.1 | 14.8 | 0.1 |
| B6Hα-1-A2-IR | 1644 | RGCNDDGGKGWSDDPFYHKLSELICGG | 22.3 | 14.6 | 1.0 | 14.6 | 0.1 |
| 20E2A-4-F11-IGFR | 1645 | QGGSASFYDAIDRLLRMRIGG | 21.3 | 18.8 | 1.3 | 14.6 | 0.1 |
| B6Hα-3-E9-IR | 1646 | RCEEKQAEVGPSSDPFYHKMSELLGCR | 44.6 | 24.2 | 1.7 | 14.2 | 0.1 |
| 20C-3-F6-IGFR | 1647 | DRDFCRFYERLTALVGGQVDGGWPC | 33.5 | 26.1 | 1.9 | 14.1 | 0.1 |
| 20E2B-4-H3-IGFR | 1648 | KLHNLMFYYGLQRLVWGAGLG | 11.2 | 14.8 | 1.1 | 13.9 | 0.1 |
| 20E2B-3-C2-IGFR | 1649 | GNGDGMFYQLLSLLVGRDMHV | 13.1 | 8.9 | 0.6 | 13.8 | 0.1 |
| 20C-3-A1-IGFR | 1650 | SSYGCDGFYLMLFSLGLVASQELEC | 26.5 | 20.8 | 1.5 | 13.7 | 0.1 |
| 20E2B-3-E3-IGFR | 1651 | PDLHKGFYAQLAQLIRGQLLS | 22.4 | 16.3 | 1.3 | 13.1 | 0.1 |
| R20α-3-20E2-IR | 1652 | FYDAIDQLVRGSARAGGTRD | 46.3 | 39.9 | 3.1 | 12.9 | 0.1 |
| 20E2B-4-H12-IGFR | 1653 | YSCGDGFYSLLSDLLGGQFRC | 6.5 | 9.7 | 0.8 | 12.8 | 0.1 |
| B6Hα-3-F11-IR | 1654 | RGMKEEVLVGGSTDPFYHKLSELLQGS | 49.5 | 18.7 | 1.6 | 11.7 | 0.1 |
| 20E2B-3-D2-IGFR | 1655 | IQQELTFYDLLHRLVRSELGS | 20.7 | 12.4 | 1.1 | 11.7 | 0.1 |
| 20E2B-3-D8-IGFR | 1656 | GGTEVDFYRALERLVRGQLGL | 20.4 | 17.7 | 1.6 | 11.3 | 0.1 |
| 20E2B-3-E8-IFGR | 1657 | LRIANLFYQRLWDLAFGGGG | 15.7 | 16.7 | 1.5 | 11.1 | 0.1 |
| B6Hα-2-C4-IR | 1658 | RCGRW*AEMGAGDDPFYHKLSELVCG | 20.7 | 9.9 | 0.9 | 11.0 | 0.1 |
| R20α-4-20C11-IR | 1659 | DRAFYNGLRDLVGAVYGAWD | 43.7 | 30.8 | 3.0 | 10.3 | 0.1 |
| 20E2B-4-F8-IGFR | 1660 | PVGVQGFYEGLSRLVLGRGGW | 12.3 | 7.3 | 0.8 | 9.7 | 0.1 |
| 20E2B-1-A11-IGFR | 1661 | RFSTDGFYQYLLALVGGGPVG | 15.0 | 9.5 | 1.0 | 9.7 | 0.1 |
| 20E2B-3-D4-IGFR | 1662 | NSRDGGFYLQLERLLGFPVTG | 8.1 | 7.9 | 0.8 | 9.6 | 0.1 |
| 20E2B-2-B11-IGFR | 1663 | VVTPVNFYRALEALVRG.RLG | 13.9 | 10.6 | 1.1 | 9.4 | 0.1 |
| 20E2B-3-C8-IGFR | 1664 | QPAPDGFYSALMKLIGRGGVS | 18.5 | 15.6 | 1.8 | 8.9 | 0.1 |
| 20E2B-2-B2-IGFR | 1665 | PGTDLGFYQALRCVVIQGACD | 11.7 | 4.9 | 0.6 | 8.1 | 0.1 |
| 20E2B-4-F10-IGFR | 1666 | AQPCGGFYGLLEQLVGRSVCD | 19.0 | 17.3 | 2.2 | 7.8 | 0.1 |
| 20E2B-4-F9-IGFR | 1667 | QPDHSYFYSLLQELVGSEERL | 11.9 | 14.7 | 1.9 | 7.7 | 0.1 |
| 20C-3-A4-IGFR | 1668 | QFYGCLLDLSLGVPSFGWRRRCITA | 17.7 | 8.8 | 1.2 | 7.6 | 0.1 |
| 20E2B-3-D11-IGFR | 1669 | LGVTDGFYAALGYLIHGVGQF | 14.3 | 12.2 | 1.6 | 7.6 | 0.1 |
| 20E2B-3-C11-IGFR | 1670 | CMM.DGFYAGLGCLLTAGEGR | 15.3 | 15.4 | 2.1 | 7.5 | 0.1 |
| 20E2B-2-B3-IGFR | 1671 | ICTGQGFYQVLCGLLRGTSAR | 9.1 | 5.3 | 0.7 | 7.4 | 0.1 |
| 20E2B-3-D12-IGFR | 1672 | QGNVLDFYGWIGRLLAKQGSD | 10.3 | 6.2 | 0.9 | 7.3 | 0.1 |
| 20E2B-3-E12-IGFR | 1673 | VATSQGFYSGLSELLQGGGNV | 13.9 | 6.0 | 0.8 | 7.3 | 0.1 |
| 20E2B-2-B8-IGFR | 1674 | IWATGDFYRLLSQLVMGRVGT | 17.4 | 5.7 | 0.8 | 7.2 | 0.1 |
| NNRPγ-4-A9-IR | 1675 | EGSGFYGYFFSLLGLQG | 3.0 | 10.0 | 1.4 | 7.1 | 0.1 |
| 20E2B-4-G11-IGFR | 1676 | RQGTGSFYLMLEQLLVGARGP | 8.9 | 4.5 | 0.6 | 7.0 | 0.1 |
| 20E2B-3-D6-IGFR | 1677 | DSVGDNFYQLLESLVGGHGVG | 20.7 | 17.8 | 2.6 | 6.9 | 0.1 |
| B6Hα-2-C7-IR | 1678 | RGIVAMVEATEVGSDHPFYHKLSELVQGS | 45.1 | 6.7 | 1.0 | 6.7 | 0.1 |
| 20E2B-2-B7-IGFR | 1679 | LSSDGQFYRALNLLLQGSAGR | 18.0 | 6.1 | 0.9 | 6.7 | 0.1 |
| 20E2B-3-C4-IGFR | 1680 | ASSASGFYELLQRLAGLGLEV | 23.4 | 20.4 | 3.3 | 6.2 | 0.2 |
| 20C-3-E4-IGFR | 1681 | FFYRCLSRLLGGQLGSRLGLSCIGD | 37.7 | 7.7 | 1.3 | 6.0 | 0.2 |
| NNRPγ-4-A1-IR | 1682 | IIGGFYSYFNSVLRLGT | 9.7 | 10.9 | 1.8 | 6.0 | 0.2 |
| 20E2B-4-H8-IGFR | 1683 | PAGPCGFYCGLGLLLHGDQSP | 7.2 | 5.3 | 0.9 | 5.9 | 0.2 |
| 20E2B-4-H9-IGFR | 1684 | RCQGTGFYTCIQELIGFGDPD | 4.5 | 5.2 | 0.9 | 5.6 | 0.2 |
| B6Hα-2-C10-IR | 1685 | SGAKVIVVTGDSGDPFYHKLSELLQGS | 46.9 | 5.8 | 1.1 | 5.3 | 0.2 |
| 20E2A-3-C7-IGFR | 1686 | VGTVAGFYDAIAQLVARASRV | 17.6 | 5.4 | 1.1 | 5.1 | 0.2 |
| 20E2B-1-A8-IGFR | 1687 | TLRSPTFYDWLEMVLTHGQGG | 16.1 | 4.4 | 0.9 | 5.0 | 0.2 |
| NNRPγ-4-A7-IR | 1688 | RFDPFYSYFVNLLGASA | 2.5 | 6.3 | 1.3 | 4.9 | 0.2 |
| B6Hα-3-E8-IR | 1689 | RGKTAAVIVGRPADPFYHKLSELLQGG | 47.6 | 5.3 | 1.1 | 4.8 | 0.2 |
| B6Hα-3-F10-IR | 1690 | GCVVEWQKWHGASDPFYHKLSELGGCS | 47.2 | 8.8 | 1.9 | 4.6 | 0.2 |
| B6Hα-2-D6-IR | 1691 | GRTMAVMAAGGPDDPFYHKLSELVQGG | 33.5 | 4.4 | 1.0 | 4.4 | 0.2 |
| B6Hα-3-E7-IR | 1692 | GCAVVEEAERSRGDPFYHKLSELIQGC | 47.0 | 5.6 | 1.3 | 4.3 | 0.2 |
| B6Hα-2-D1-IR | 1693 | GCEVIVEEGDSADPFYHKLSELCQGS | 11.7 | 5.4 | 1.3 | 4.2 | 0.2 |
| 20E2A-3-D10-IGFR | 1694 | MMVVDGFYDALHQLVVAQSLG | 20.6 | 6.9 | 1.8 | 3.9 | 0.3 |
| 20E2A-3-A12-IGFR | 1695 | LSVALSFYDALGQLVAGEGRW | 16.1 | 4.3 | 1.1 | 3.9 | 0.3 |
| B6Hα-4-G8-IR | 1696 | GGTKAVAKVGTRDDPFYHKLSELLQGS | 32.3 | 6.1 | 1.7 | 3.6 | 0.3 |
| B6L-4-D7-IR | 1697 | AETSVQVGWIRLQSVWPGEHWNTVDPFYHKLSELLRGSGA | 14.3 | 4.8 | 1.4 | 3.4 | 0.3 |
| B6Hα-1-A3-IR | 1698 | SRAKVEAEMPDSGDPFYHKLSELLASG | 37.4 | 2.6 | 0.8 | 3.3 | 0.3 |
| B6Hα-3-F7-IR | 1699 | SRVAATKEKRPSDDPFYHKLSELLQGS | 41.5 | 3.1 | 1.0 | 3.1 | 0.3 |
| B6Hα-D8-IR | 1700 | SSETAKMVTGTRDDPFYHKLSELVQGS | 19.3 | 3.0 | 1.0 | 3.0 | 0.3 |
| B6Hα-1-B3-IR | 1701 | GCITAENGAGDPFYHKLSELGGCS | 33.1 | 3.2 | 1.1 | 2.9 | 0.3 |
| B6Hα-3-E5-IR | 1702 | RCGDEEGWQENRRDDPFYHKLSELFGGC | 28.8 | 2.9 | 1.0 | 2.9 | 0.3 |
| 20E2A-4-G11-IGFR | 1703 | MNVFVSFYDAIDQLVCQRIGC | 20.7 | 3.3 | 1.3 | 2.6 | 0.4 |
| 20E2Bβ-3-C7-IR | 1704 | QSGSGDFYDWLSRLIRGNGDG | 1.5 | 3.1 | 1.5 | 2.0 | 0.5 |
| B6Hα-3-E6-IR | 1705 | CGAKMTGTPNDPFYHKLSELLQRG | 18.2 | 2.3 | 1.2 | 1.9 | 0.5 |
| 20E2A-3-A3-IGFR | 1706 | GHYFGSFYDAIDQLVAGMLPG | 5.2 | 3.0 | 1.5 | 1.9 | 0.5 |
| B6L-4-A7-IR | 1707 | AGTPAQVG*NRLWSVWPGEHWNTVDPFYNKLSELLRESGA | 11.6 | 3.4 | 1.9 | 1.8 | 0.6 |
| B6Hα-3-F1-IR | 1708 | CSMAAVAEAGDDDDPFYHKLSELCQGS | 22.5 | 2.4 | 1.3 | 1.8 | 0.5 |
| B6L-3-G6-IR | 1709 | VDTPAQVGWNRLWSVGPGEHWYTDDPFYH*LSELLRESGA | 7.6 | 2.5 | 1.8 | 1.4 | 0.7 |
| B6L-3-G5-IR | 1710 | AETSAQVGWQRLWSVWPGDHWSTLDPFYHKLSELLRESGA | 11.5 | 2.0 | 1.4 | 1.4 | 0.7 |
| 20E2A-3-A4-IGFR | 1711 | AGSVTSFYDAMEQLVATGTSA | 16.8 | 2.5 | 1.8 | 1.4 | 0.7 |
| B6-PD1-IGFR | 1712 | TDDGFYDALEQLVQGSKK | | | | | |
| 20E2-PD1-IGFR(RP10) | 1713 | GSFYEALQRLVGGEQGKK | | | | | |

FORMULA 10 (Group 6):

| | | | | | | | |
|---|---|---|---|---|---|---|---|
| R20β-4-E8-IR | 1714 | VRGFQGGTVWPGYEWLRNAA | 41.0 | 34.9 | 3.6 | 9.7 | 0.1 |
| 40F-4-D1-IGFR | 1715 | LSCLAYSRHGIWRPSTDLGLGRSVGEGSVSTRWRGYDWFE | 4.9 | 4.6 | 0.3 | 13.1 | 0.1 |
| 40F-4-B1-IGFR | 1716 | GLDHSDAVGVHLGFAWPAQARGRWEAGGLEDTWAGYDWL | 4.1 | 3.0 | 0.2 | 13.1 | 0.1 |
| 40F-4-D10-IGFR | 1717 | W.GYAWLS | 4.9 | 4.5 | 0.4 | 11.7 | 0.1 |

[0201] Besides relative binding at IR or IGF-1R, relative efficacy at the cognate receptor is another important consideration for choosing a potential therapeutic. Thus, a sequence that is efficacious at IR but has little or no significant activity at IGF-1R may also be considered as an important IR therapeutic, irrespective of the relative binding affinities at IR and IGF-1R. For example, A6 selectivity for IR may be enhanced by including glutamic acid in a carboxyl terminal extension at position X₉₅. IR selectivity of the B6 motif may be enhanced by having a tryptophan or phenylalanine at X₁₁. Tryptophan at X₁₃ also favors selectivity of IR. A tryptophan amino acid at X₁₃ rather than leucine at that position also may be used to enhance selectivity for IR. In the reverse B6 motif, a large amino acid at X₁₅ favors IR selectivity. Conversely, small amino acids may confer specificity for IGF-1R. In the F8 motif, an L in position X₂₃ is essentially required for IR binding. In addition, tryptophan at X₃₁ is also highly preferred. At X_{32,} glycine is preferred for IR selectivity.

[0202] D. Multiple Binding Sites on IR and IGF-1R

[0203] The competition data disclosed herein reveals that at least two separate binding sites are present on IR and IGF-1R which recognize the different sequence motifs provided by this invention.

[0204] As shown in FIG. 6, competition data indicate that peptides comprising the A6 motifs compete for binding to the same site on IR (Site 1) whereas the D8 motifs compete for a second site (Site 2). The identification of peptides that bind to separate binding sites on IR and IGF-1R provides for various schemes of binding to IR or IGF-1R to increase or decrease its activity. Examples of such schemes for IR are illustrated in FIG. 7.

[0205] The table below shows sequences based on their groups, which bind to Site 1 or Site 2.

TABLE 2

| | | |
|---|---|---|
| | | SEQ ID |
| Clone | Sequence | NO: |

REPRESENTATIVE SITE 1 PEPTIDES

A6-like (FYxWF) (SEQ ID NO: 1596):

| | | |
|---|---|---|
| G3 | KRGGGTFYEWFESALRKHGAGKK | 1718 |
| H2 | VTFTSAVFHENFYDWFVRQVSKK | 1719 |
| H2C | FHENFYDWFVRQVSKK | 1556 |
| A6S-IR3-E12 | GRVDWLQRNANFYDWFVAELG | 1560 |
| A6S-IR4 -G1 | NGVERAGTGDNFYDWFVAQLH | 1720 |
| H2CB-R3-B12 | QSDSGTVHDRFYGWFRDTWAS | 1721 |
| 20E2A-R3-B11 | GRFYGWFQDAIDQLMPWGFDP | 1722 |
| rB6-F6 | RYGRWGLAQQFYDWFDR | 1723 |
| E4Dα-1-B8-IR˜ | GFREGQRWYWFVAQVT | 1724 |
| H2CA-4-F11-IR | TYKARFLHENFYDWFNRQVSQYFGRV | 1725 |
| N2CB-R3-D2 | WTDVDGFHSGFYRWFQNQWER | 1726 |
| H2CB-R3-D12 | VASGHVLHGQFYRWFVDQFAL | 1727 |
| H2CB-R4-H5 | QARVGNVHQQFYEWFREVMQG | 1728 |
| H2C-B-E8* | TGHRLGLDEQFYWWFRDALSG | 1729 |
| H2CB-3-B6-IR˜ | VGDFCVSHDCFYGWFLRESMQ | 1730 |
| A6S-IR2-C1 | RMYFSTGAPQNFYDWFVQEWD | 1731 |

B6-like (FYxxLxxL) (SEQ ID NO: 1732):

| | | |
|---|---|---|
| 20C11 | KDRAFYNGLRDLVGAVYGAWDKK | 1733 |
| 20E2 | DYKDFYDAIDQLVRGSARAGGTRDKK | 1734 |
| B62-R3-C7 | EHWNTVDPFYFTLFEWLEESG | 1735 |
| B62-R3-C10 | EHWNTVDPFYQYFSELLRESG | 1736 |
| 20E2B-3-B3-IR | AGVNAGFYRYFSTLLDWWDQG | 1737 |
| 20E2-B-E3* | IQGWEPFYGWFDDVVAQMFEE | 1738 |
| 20E2A-R4-F9 | PPWGARFYDAIEQLVFDNLCC | 1739 |
| RPNN-4-G6-HOLO* | RWPNFYGYFESLLTHFS | 1740 |
| RPNN-4-F3-HOLO* | HYNAFYEYFQVLLAETW | 1741 |
| 20E2A-R4-E2 | IGRVRSFYDAIDKLFQSDWER | 1742 |
| RPNN-2-C1-IR* | EGWDFYSYFSGLLASVT | 1743 |
| 20E2B-4-F12-IR | SVKEVQFYRYFYDLLQSEESG | 1744 |
| 20E2-B-E12 | GNSGGSFYRYFQLLLDSDGMS | 1745 |
| 20E2A-R3-B6 | RDAGSSFYDAIDQLVCLTYFC | 1746 |

Reverse B6-like (LxxLxxYF) (SEQ ID NO: 1747):

| | | |
|---|---|---|
| rB6-A12 | LDALDRLMRYFEERPSL | 1748 |
| rB6-F9 | PLAELWAYFEHSEQGRSSAH | 1749 |
| rB6-4-E7-IR | LDPLDALLQYFWSVPGH | 1750 |
| rB6-4-F9-IR | RGRLGSLSTQFYNWFAE | 1751 |
| rB6-E6 | ADELEWLLDYFMHQPRP | 1752 |
| rB6-4-F12-IR | DGVLEELFSYFSATVGP | 1753 |

Group 6 (WPxYxWL) (SEQ ID NO: 1754):

| | | |
|---|---|---|
| R20β-4-A4-IR | WPGYLFFEEALQDWRGSTED | 1755 |

Peptides by design**:

| | | |
|---|---|---|
| H2C-PD1-IR˜ | AAVHEQFYDWFADQYKK | 1756 |
| A6S-PD1-IR˜ | QAPSNFYDWFVREWDKK | 1757 |
| 20E2-PD1-IR˜ | QSFYDYIEELLGGEWKK | 1758 |
| B6C-PD1-IR˜ | DPFYQGLWEWLRESGKK | 1759 |

REPRESENTATIVE SITE 2 PEPTIDES (C—C LOOPS)

F8-derived (Long C—C loop):

| | | |
|---|---|---|
| F8 | HLCVLEELFWGASLFGYCSG | 1760 |
| F8-C12 | FQSLLEELVWGAPLFRYGTG | 1761 |
| F8-Des2 | PLCVLEELFWGASLFGYCSG | 1762 |
| F8-F12 | PLCVLEELFWGASLFGQCSG | 1763 |
| F8-B9 | HLCVLEELFWGASLFGQCSG | 1764 |
| F8-B12 | DLRVLCELFGGAYVLGYCSE | 1765 |
| NNKH-2B3 | HRSVLKQLSWGASLFGQWAG | 1766 |
| NNKH-2F9˜ | HLSVGEELSWWVALLGQWAR | 1767 |
| NNKH-4H4˜ | APVSTEELRWGALLFGQWAG | 1768 |

D8-derived (Small C—C loop):

| | | |
|---|---|---|
| D8 | KWLDQEWAWVQCEVYGRGCPSKK | 1769 |
| D8-G1 | QLEEEWAGVQCEVYGRECPS | 1770 |
| D8-B5˜ | ALEEEWAWVQVRSIRSGLPL | 1771 |
| D8-A7 | SLDQEWAWVQCEVYGRGCLS | 1772 |
| D8-F1˜ | WLEHEWAQIQCELYGRGCTY | 1773 |
| Midi C—C loop: | | |
| D8-F10 | GLEQGCPWVGLEVQCRGCPS | 1774 |
| F8-B12˜ | DLRVLCELFGGAYVLGYCSE | 1775 |
| F8-A9 | PLWGLCELFGGASLFGYCSS | 1776 |

**Based on analysis of entire panning data, amino acid preferences at each position were calculated to define these “idealized” peptides; *Peptides synthesized and currently being purified; ˜Peptides planned.

[0206] In various aspects of the present invention, amino acid sequences comprising Site 1 motifs may bind to Site 1 of IR or Site 1 of IGF-1R. Similarly, amino acids sequences comprising Site 2 motifs may bind to Site 2 of IR or Site 2 of IGF-1R. However, specific peptides may show higher binding affinity for IR than for IGF-1R, while other peptides may show higher binding affinity for IGF-1R than for IR. In addition, Site 1 and Site 2 on IR do not cross-talk, i.e., Site 1-binding sequences do not compete with Site 2-binding sequences at IR. In contrast, Site 1 and Site 2 on IGF-1R do show some cross-talk, suggesting an allosteric effect. These aspects are illustrated in the Examples described hereinbelow.

[0207] E. Multivalent Ligands

[0208] This invention provides ligands that preferentially bind different sites on IR and IGF-1R. The A6 amino acid sequence motif confers binding to IR at Site 1 (FIG. 6). The D8 amino acid sequence motif confers binding to IR at Site 2 (FIG. 6). Accordingly, multimeric ligands may be prepared according to the invention by covalently linking amino acid sequences. Depending on the purpose intended for the multivalent ligand, amino acid sequences that bind the same or different sites may be combined to form a single molecule. Where the multivalent ligand is constructed to bind to the same corresponding site on different receptors, or different subunits of a receptor, the amino acid sequences of the ligand for binding to the receptors may be the same or different, provided that if different amino acid sequences are used, they both bind to the same site.

[0209] Multivalent ligands may be prepared by either expressing amino acid sequences which bind to the individual sites separately and then covalently linking them together, or by expressing the multivalent ligand as a single amino acid sequence which comprises within it the combination of specific amino acid sequences for binding.

[0210] Various combinations of amino acid sequences may be combined to produce multivalent ligands having specific desirable properties. Thus, agonists may be combined with agonists, antagonists combined with antagonists, and agonists combined with antagonists. Combining amino acid sequences that bind to the same site to form a multivalent ligand may be useful to produce molecules that are capable of cross-linking together multiple receptor units. Multivalent ligands may also be constructed to combine amino acid sequences which bind to different sites (FIG. 7).

[0211] In view of the discovery disclosed herein of monomers having agonist properties at IR or IGF-1R, preparation of multivalent ligands may be useful to prepare ligands having more desirable pharmacokinetic properties due to the presence of multiple bind sites on a single molecule. In addition, combining amino acid sequences that bind to different sites with different affinities provides a means for modulating the overall potency and affinity of the ligand for IR or IGF-1R.

[0212] 1. Construction of Hybrids

[0213] In one embodiment, hybrids of at least two peptides (e.g., dimer peptides) may be produced as recombinant fusion polypeptides, which are expressed in any suitable expression system. The polypeptides may bind the receptor as either fusion constructs containing amino acid sequences besides the ligand binding sequences or as cleaved proteins from which signal sequences or other sequences unrelated to ligand binding are removed. Sequences for facilitating purification of the fusion protein may also be expressed as part of the construct. Such sequences optionally may be subsequently removed to produce the mature binding ligand. Recombinant expression also provides means for producing large quantities of ligand. In addition, recombinant expression may be used to express different combinations of amino acid sequences and to vary the orientation of their combination, i.e., amino to carboxyl terminal orientation.

[0214] In one embodiment shown below (FIG. 28), MBP-FLAG®-PEPTIDE-(GGS)ₙ (SEQ ID NO:1777)-PEPTIDE-E-TAG, a fusion construct producing a peptide dimer comprises a maltose binding protein amino acid sequence (MBP) or similar sequence useful for enabling the affinity chromatography purification of the expressed peptide sequences. This purification facilitating sequence may then be attached to a FLAG® sequence to provide a cleavage site to remove the initial sequence. The dimer then follows which includes the intervening linker and a tag sequence may be included at the carboxyl terminal portion to facilitate identification/purification of the expression of peptide. In the representative construct illustrated above, G and S are glycine and serine residues, which make up the linker sequence. As non-limiting examples, n can be 1, 2, 3, or 4 to yield a linker sequence of 3, 6, 9, and 12 amino acids, respectively.

[0215] In addition to producing the dimer peptides by recombinant protein expression, dimer peptides may also be produced by peptide synthesis whereby a synthetic technique such as Merrifield synthesis (Merrifield, 1997), may be used to construct the entire peptide.

[0216] Other methods of constructing dimer peptides include introducing a linker molecule that activates the terminal end of a peptide so that it can covalently bind to a second peptide. Examples of such linkers include, but are not limited to, diaminoproprionic acid activated with an oxyamino function. A preferred linker is a dialdehyde having the formula O═CH—(CH₂)ₙ—CH═O, wherein n is at least 2 to 6, but is preferably 6 to produce a linker of about 25 to 30 angstroms in length. Other preferred linkers are shown in Table 3. Linkers may be used, for example, to couple monomers at either the carboxyl terminal or the amino terminal ends to form dimer peptides. Also, the chemistry can be inverted, i.e., the peptides to be coupled can be equipped with aldehyde functions, either by oxidation with sodium periodate of an N-terminal serine, or by oxidation of any other vicinal hydroxy- or amino-groups, and the linker can comprise two oxyamino functions (e.g., at end of a polyethylene glycol linker) or amino groups which are coupled by reductive amination.

[0217] In specific embodiments, Site 1-Site 2 and Site 2-Site 1 orientations are possible. In addition, N-terminal to N-terminal (N—N); C-terminal to C-terminal (C—C); N-terminal to C-terminal (N—C); and C-terminal to N-terminal (C—N) linkages are possible. Accordingly, peptides may be oriented Site 1 to Site 2, or Site 2 to Site 1, and may be linked N-terminus to N-terminus, C-terminus to C-terminus, N-terminus to C-terminus, or C-terminus to N-terminus. In certain cases, a specific orientation may be preferable to others, for example, for maximal agonist or antagonist activity.

[0218] In an unexpected and surprising result, the orientation and linkage of the monomer subunits has been found to dramatically alter dimer activity (see Examples, below). In particular, certain Site 1/Site 2 heterodimer sequences show agonist or antagonist activity at IR, depending on orientation and linkage of the constituent monomer subunits. For example, a Site 1-Site 2 orientation (C-N linkage), e.g., the S453 heterodimer, shows antagonist activity at IR (FIG. 18A; Table 7). In contrast, a Site 2-Site 1 orientation (C-N linkage), e.g., the S455 heterodimer, shows potent agonist activity at IR (FIG. 18D; Table 7). Similarly, Site 1-Site 2 (C-N linkage) heterodimers, e.g., S425 and S459, show antagonist activity at IR (Table 7), while Site 1-Site 2 (C-C or N-N linkage) heterodimers, e.g., S432-S438, S454, and S456, show agonist activity (Table 7).

[0219] Whether produced by recombinant gene expression or by conventional chemical linkage technology, the various amino acid sequences may be coupled through linkers of various lengths. Where linked sequences are expressed recombinantly, and based on an average amino acid length of about 4 angstroms, the linkers for connecting the two amino acid sequences would typically range from about 3 to about 12 amino acids corresponding to from about 12 to about 48 Å. Accordingly, the preferred distance between binding sequences is from about 2 to about 50 Å. More preferred is 4 to about 40. The degree of flexibility of the linker between the amino acid sequences may be modulated by the choice of amino acids used to construct the linker. The combination of glycine and serine is useful for producing a flexible, relatively unrestrictive linker. A more rigid linker may be constructed by using amino acids with more complex side chains within the linkage sequence.

[0220] 2. Characterization of Specific Dimers

[0221] Specific dimers which are comprised of monomer subunits that both bind with high affinity to the same site on IR or IGF-1R (e.g., Site 1-Site 1 or Site 2-Site 2), or monomer subunits that bind to different sites on IR or IGF-1R (e.g., Site 1-Site 2 or Site 2-Site 1) are disclosed herein.

[0222] Other combinations of peptides are within the scope of this invention and may be determined as demonstrated in the examples described herein.

[0223] F. Peptide Synthesis

[0224] Many conventional techniques in molecular biology, protein biochemistry, and immunology may be used to produce the amino acid sequences for use with this invention. The present invention encompasses the specific amino acid sequences shown in FIGS. 1-4, 8, and 9 and Table 7, inter alia, without additions (e.g., linker or spacer sequences) deletions, alterations, or modification. The present invention further encompasses variants that include additional sequences, altered sequences, and functional fragments thereof. In a preferred embodiment, the amino acid sequence variant or fragment shares at least one function characteristic (e.g., binding, agonist, or antagonist activity) of the reference sequence. Variant peptides include, for example, genetically engineered mutants, and may differ from the amino acid sequences shown in the figures and tables of the application by the addition, deletion, or substitution of one or more amino acid residues. Alterations may occur at the amino- or carboxy-terminal positions of the reference amino acid sequence or anywhere between those terminal positions, interspersed either individually among the amino acids in the reference sequence or in one or more contiguous groups within the reference sequence. In addition, variants may comprise synthetic or non-naturally occurring amino acids in accordance with this invention.

[0225] Variant amino acid sequences can have conservative changes, wherein a substituted amino acid has similar structural or chemical properties, e.g., replacement of leucine with isoleucine. More infrequently, a variant peptide can have non-conservative changes, e.g., substitution of a glycine with a tryptophan. Guidance in determining which amino acid residues can be substituted, inserted, or deleted without abolishing binding or biological activity can be found using computer programs well-known in the art, for example, DNASTAR software (DNASTAR, Inc., Madison, Wis.). Guidance is also provided by the data disclosed herein. In particular, FIGS. 1-4, 8, 9, 43, 44, and Table 7, inter alia, teach which amino acid residues can be deleted, added, substituted, or modified, while maintaining the IR- or IGF-1R-related function(s) (e.g., binding, agonist, or antagonist activity) of the amino acid sequences.

[0226] For the purposes of this invention, the amino acids are grouped as follows: amino acids possessing alcohol groups are serine (S) and threonine (T). Aliphatic amino acids are isoleucine (I), leucine (L), valine (V), and methionine (M). Aromatic amino acids are phenylalanine (F), histidine (H), tryptophan (W), and tyrosine (Y). Hydrophobic amino acids are alanine (A), cysteine (C), phenylalanine (F), glycine (G), histidine (H), isoleucine (I), leucine (L), methionine (M), arginine (R), threonine (T), valine (V), tryptophan (W), and tyrosine (Y). Negative amino acids are aspartic acid (D) and glutamic acid (E). The following amino acids are polar amino acids: cysteine (C), aspartic acid (D), glutamic acid (E), histidine (H), lysine (K), asparagine (N), glutamine (Q), arginine (R), serine (S), and threonine (T). Positive amino acids are histidine (H), lysine (K), and arginine (R). Small amino acids are alanine (A), cysteine (C), aspartic acid (D), glycine (G), asparagine (N), proline (P), serine (S), threonine (T), and valine (V). Very small amino acids are alanine (A), glycine (G) and serine (S). Amino acids likely to be involved in a turn formation are alanine (A), cysteine (C), aspartic acid (D), glutamic acid (E), glycine (G), histidine (H), lysine (K), asparagine (N), glutamine (Q), arginine (R), serine (S), proline (P), and threonine (T). As non-limiting examples, the amino acids within each of these defined groups may be substituted for each other in the formulas described above, as conservative substitutions, subject to the specific preferences stated herein.

[0227] Substantial changes in function can be made by selecting substitutions that are less conservative than those shown in the defined groups, above. For example, non-conservative substitutions can be made which more significantly affect the structure of the peptide in the area of the alteration, for example, the alpha-helical, or beta-sheet structure; the charge or hydrophobicity of the molecule at the target site; or the bulk of the side chain. The substitutions which generally are expected to produce the greatest changes in the peptide's properties are those where 1) a hydrophilic residue, e.g., seryl or threonyl, is substituted for (or by) a hydrophobic residue, e.g., leucyl, isoleucyl, phenylalanyl, valyl, or alanyl; 2) a cysteine or proline is substituted for (or by) any other residue; 3) a residue having an electropositive side chain, e.g., lysyl, arginyl, or histidyl, is substituted for (or by) an electronegative residue, e.g., glutamyl or aspartyl; or 4) a residue having a bulky side chain, e.g., phenylalanine, is substituted for (or by) a residue that does not have a side chain, e.g., glycine.

[0228] Amino acid preferences have been identified for certain peptides and peptide groups of the present invention. For example, amino acid preferences for the RP9, D8, and Group 6 (Formula 10) peptides are shown in Tables 17-19, below. In some instances, cysteine pairs may also be preferred. For example, cysteine pairs are preferred in certain Formula 1 and Formula 2 sequences described herein. In accordance with the invention, the amino acid sequences of the invention may include two or more cysteine residues, which may be separated by at least 3, 4, 5, 6, 7, 8, 9, 10, 11, 12, 13, 14, 15, 16, 17, 18, or 19 amino acids, and may be positioned inside or outside the Formula 1 or Formula 2 motif sequence. Preferably, the cysteines are separated by 17 or 18 amino acids.

[0229] Variants also include amino acid sequences in which one or more residues are modified (i.e., by phosphorylation, sulfation, acylation, PEGylation, etc.), and mutants comprising one or more modified residues. Amino acid sequences may also be modified with a label capable of providing a detectable signal, either directly or indirectly, including, but not limited to, radioisotope, fluorescent, and enzyme labels. Fluorescent labels include, for example, Cy3, Cy5, Alexa, BODIPY, fluorescein (e.g., FluorX, DTAF, and FITC), rhodamine (e.g., TRITC), auramine, Texas Red, AMCA blue, and Lucifer Yellow. Preferred isotope labels include ³H, ¹⁴C, ³²P, ³⁵S, ³⁶Cl, ⁵¹Cr, ⁵⁷Co, ⁵⁸Co, ⁵⁹Fe, ⁹⁰Y, ¹²⁵I, ¹³¹I, and ¹⁸⁶Re. Preferred enzyme labels include peroxidase, β-glucuronidase, β-D-glucosidase, β-D-galactosidase, urease, glucose oxidase plus peroxidase, and alkaline phosphatase (see, e.g., U.S. Pat. Nos. 3,654,090; 3,850,752 and 4,016,043). Enzymes can be conjugated by reaction with bridging molecules such as carbodiimides, diisocyanates, glutaraldehyde, and the like. Enzyme labels can be detected visually, or measured by calorimetric, spectrophotometric, fluorospectrophotometric, amperometric, or gasometric techniques. Other labeling systems, such as avidin/biotin, Tyramide Signal Amplification (TSA™), are known in the art, and are commercially available (see, e.g., ABC kit, Vector Laboratories, Inc., Burlingame, Calif.; NEN® Life Science Products, Inc., Boston, Mass.).

[0230] 1. Recombinant Synthesis of Peptides

[0231] To obtain recombinant peptides, DNA sequences encoding these peptides may be cloned into any suitable vectors for expression in intact host cells or in cell-free translation systems by methods well-known in the art (see Sambrook et al., 1989). The particular choice of the vector, host, or translation system is not critical to the practice of the invention.

[0232] A large number of vectors, including bacterial, yeast, and mammalian vectors, have been described for replication and/or expression in various host cells or cell-free systems, and may be used for gene therapy as well as for simple cloning or protein expression. In one aspect of the present invention, an expression vector comprises a nucleic acid encoding a IR or IGF-1R agonist or antagonist peptide, as described herein, operably linked to at least one regulatory sequence. Regulatory sequences are known in the art and are selected to direct expression of the desired protein in an appropriate host cell. Accordingly, the term regulatory sequence includes promoters, enhancers and other expression control elements (see D. V. Goeddel (1990) Methods Enzymol. 185:3-7). Enhancer and other expression control sequences are described in Enhancers and Eukaryotic Gene Expression, Cold Spring Harbor Press, Cold Spring Harbor, N.Y. (1983). It should be understood that the design of the expression vector may depend on such factors as the choice of the host cell to be transfected and/or the type of peptide desired to be expressed.

[0233] Several regulatory elements (e.g., promoters) have been isolated and shown to be effective in the transcription and translation of heterologous proteins in the various hosts. Such regulatory regions, methods of isolation, manner of manipulation, etc. are known in the art. Non-limiting examples of bacterial promoters include the β-lactamase (penicillinase) promoter; lactose promoter; tryptophan (trp) promoter; araBAD (arabinose) operon promoter; lambda-derived P₁ promoter and N gene ribosome binding site; and the hybrid tac promoter derived from sequences of the trp and lac UV5 promoters. Non-limiting examples of yeast promoters include the 3-phosphoglycerate kinase promoter, glyceraldehyde-3-phosphate dehydrogenase (GAPDH) promoter, galactokinase (GAL1) promoter, galactoepimerase promoter, and alcohol dehydrogenase (ADH1) promoter. Suitable promoters for mammalian cells include, without limitation, viral promoters, such as those from Simian Virus 40 (SV40), Rous sarcoma virus (RSV), adenovirus (ADV), and bovine papilloma virus (BPV). Preferred replication and inheritance systems include M13, ColE1, SV40, baculovirus, lambda, adenovirus, CEN ARS, 2 μm ARS and the like. While expression vectors may replicate autonomously, they may also replicate by being inserted into the genome of the host cell, by methods well-known in the art.

[0234] To obtain expression in eukaryotic cells, terminator sequences, polyadenylation sequences, and enhancer sequences that modulate gene expression may be required. Sequences that cause amplification of the gene may also be desirable. Furthermore, sequences that facilitate secretion of the recombinant product from cells, including, but not limited to, bacteria, yeast, and animal cells, such as secretory signal sequences and/or preprotein or proprotein sequences, may also be included. These sequences are well-described in the art. DNA sequences can be optimized, if desired, for more efficient expression in a given host organism or expression system. For example, codons can be altered to conform to the preferred codon usage in a given host cell or cell-free translation system using well-established techniques.

[0235] Codon usage data can be obtained from publicly-available sources, for example, the Codon Usage Database at http://www.kazusa.or.jp/codon/. In addition, computer programs that translate amino acid sequence information into nucleotide sequence information in accordance with codon preferences (i.e., backtranslation programs) are widely available. See, for example, Backtranslate program from Genetics Computer Group (GCG), Accelrys, Inc., Madison, Wis.; and Backtranslation Applet from Entelechon GmbH, Regensburg, Germany. Thus, using the peptide sequences disclosed herein, one of ordinary skill in the art can design nucleic acids to yield optimal expression levels in the translation system or host cell of choice.

[0236] Expression and cloning vectors will likely contain a selectable marker, a gene encoding a protein necessary for survival or growth of a host cell transformed with the vector. The presence of this gene ensures growth of only those host cells that express the inserts. Typical selection genes encode proteins that 1) confer resistance to antibiotics or other toxic substances, e.g., ampicillin, neomycin, methotrexate, etc.; 2) complement auxotrophic deficiencies, or 3) supply critical nutrients not available from complex media, e.g., the gene encoding D-alanine racemase for Bacilli. Markers may be an inducible or non-inducible gene and will generally allow for positive selection. Non-limiting examples of markers include the ampicillin resistance marker (i.e., beta-lactamase), tetracycline resistance marker, neomycin/kanamycin resistance marker (i.e., neomycin phosphotransferase), dihydrofolate reductase, glutamine synthetase, and the like. The choice of the proper selectable marker will depend on the host cell, and appropriate markers for different hosts as understood by those of skill in the art.

[0237] Suitable expression vectors for use with the present invention include, but are not limited to, pUC, pBluescript (Stratagene), pET (Novagen, Inc., Madison, Wis.), and pREP (Invitrogen) plasmids. Vectors can contain one or more replication and inheritance systems for cloning or expression, one or more markers for selection in the host, e.g., antibiotic resistance, and one or more expression cassettes. The inserted coding sequences can be synthesized by standard methods, isolated from natural sources, or prepared as hybrids. Ligation of the coding sequences to transcriptional regulatory elements (e.g., promoters, enhancers, and/or insulators) and/or to other amino acid encoding sequences can be carried out using established methods.

[0238] Suitable cell-free expression systems for use with the present invention include, without limitation, rabbit reticulocyte lysate, wheat germ extract, canine pancreatic microsomal membranes, E. coli S30 extract, and coupled transcription/translation systems (Promega Corp., Madison, Wis.). These systems allow the expression of recombinant peptides upon the addition of cloning vectors, DNA fragments, or RNA sequences containing protein-coding regions and appropriate promoter elements.

[0239] Non-limiting examples of suitable host cells include bacteria, archea, insect, fungi (e.g., yeast), plant, and animal cells (e.g., mammalian, especially human). Of particular interest are Escherichia coli, Bacillus subtilis, Saccharomyces cerevisiae, SF9 cells, C129 cells, 293 cells, Neurospora, and immortalized mammalian myeloid and lymphoid cell lines. Techniques for the propagation of mammalian cells in culture are well-known (see, Jakoby and Pastan (Eds), 1979, Cell Culture. Methods in Enzymology, volume 58, Academic Press, Inc., Harcourt Brace Jovanovich, N.Y.). Examples of commonly used mammalian host cell lines are VERO and HeLa cells, CHO cells, and WI38, BHK, and COS cell lines, although it will be appreciated by the skilled practitioner that other cell lines may be used, e.g., to provide higher expression, or other features.

[0240] Host cells can be transformed, transfected, or infected as appropriate by any suitable method including electroporation, calcium chloride-, lithium chloride-, lithium acetate/polyethylene glycol-, calcium phosphate-, DEAE-dextran-, liposome-mediated DNA uptake, spheroplasting, injection, microinjection, microprojectile bombardment, phage infection, viral infection, or other established methods. Alternatively, vectors containing the nucleic acids of interest can be transcribed in vitro, and the resulting RNA introduced into the host cell by well-known methods, e.g., by injection (see, Kubo et al., 1988, FEBS Letts. 241:119). The cells into which have been introduced nucleic acids described above are meant to also include the progeny of such cells.

[0241] Nucleic acids encoding the peptides of the invention may be isolated directly from recombinant phage libraries (e.g., RAPIDLIB® or GRABLIB® libraries) described herein. Alternatively, the polymerase chain reaction (PCR) method can be used to produce nucleic acids of the invention, using the recombinant phage libraries as templates. Primers used for PCR can be synthesized using the sequence information provided herein and can further be designed to introduce appropriate new restriction sites, if desirable, to facilitate incorporation into a given vector for recombinant expression.

[0242] Nucleic acids encoding the peptides of the present invention can also be produced by chemical synthesis, e.g., by the phosphoramidite method described by Beaucage et al., 1981, Tetra. Letts. 22:1859-1862, or the triester method according to Matteucci et al., 1981, J. Am. Chem. Soc., 103:3185, and can performed on commercial, automated oligonucleotide synthesizers. A double-stranded fragment may be obtained from the single-stranded product of chemical synthesis either by synthesizing the complementary strand and annealing the strands together under appropriate conditions or by adding the complementary strand using DNA polymerase with an appropriate primer sequence.

[0243] The nucleic acids encoding the peptides of the invention can be produced in large quantities by replication in a suitable host cell. Natural or synthetic nucleic acid fragments, comprising at least ten contiguous bases coding for a desired amino acid sequence can be incorporated into recombinant nucleic acid constructs, usually DNA constructs, capable of introduction into and replication in a prokaryotic or eukaryotic cell. Usually the nucleic acid constructs will be suitable for replication in a unicellular host, such as yeast or bacteria, but may also be intended for introduction to (with and without integration within the genome) cultured mammalian or plant or other eukaryotic cells, cell lines, tissues, or organisms. The purification of nucleic acids produced by the methods of the present invention is described, for example, in Sambrook et al., 1989; F. M. Ausubel et al., 1992, Current Protocols in Molecular Biology, J. Wiley and Sons, New York, N.Y.

[0244] These nucleic acids can encode variant or truncated forms of the peptides as well as the reference peptides shown in FIGS. 1-4, 8, and 9 and Table 7, inter alia. Large quantities of the nucleic acids and peptides of the present invention may be prepared by expressing the nucleic acids or portions thereof in vectors or other expression vehicles in compatible prokaryotic or eukaryotic host cells. The most commonly used prokaryotic hosts are strains of Escherichia coli, although other prokaryotes, such as Bacillus subtilis or Pseudomonas may also be used. Mammalian or other eukaryotic host cells, such as those of yeast, filamentous fungi, plant, insect, or amphibian or avian species, may also be useful for production of the proteins of the present invention. For example, insect cell systems (i.e., lepidopteran host cells and baculovirus expression vectors) are particularly suited for large-scale protein production.

[0245] Host cells carrying an expression vector (i.e., transformants or clones) are selected using markers depending on the mode of the vector construction. The marker may be on the same or a different DNA molecule, preferably the same DNA molecule. In prokaryotic hosts, the transformant may be selected, e.g., by resistance to ampicillin, tetracycline or other antibiotics. Production of a particular product based on temperature sensitivity may also serve as an appropriate marker.

[0246] For some purposes, it is preferable to produce the peptide in a recombinant system in which the peptide contains an additional sequence (e.g., epitope or protein) tag that facilitates purification. Non-limiting examples of epitope tags include c-myc, haemagglutinin (HA), polyhistidine (6X-HIS) (SEQ ID NO:1778), GLU-GLU, and DYKDDDDK (SEQ ID NO:1779) or DYKD (SEQ ID NO:1545; FLAG®)) epitope tags. Non-limiting examples of protein tags include glutathione-S-transferase (GST), green fluorescent protein (GFP), and maltose binding protein (MBP). In one approach, the coding sequence of a peptide can be cloned into a vector that creates a fusion with a sequence tag of interest. Suitable vectors include, without limitation, pRSET (Invitrogen Corp., San Diego, Calif.), pGEX (Amersham Pharmacia Biotech, Inc., Piscataway, N.J.), pEGFP (CLONTECH Laboratories, Inc., Palo Alto, Calif.), and pMAL™ (New England BioLabs, Inc., Beverly, Mass.) plasmids. Following expression, the epitope or protein tagged peptide can be purified from a crude lysate of the translation system or host cell by chromatography on an appropriate solid-phase matrix. In some cases, it may be preferable to remove the epitope or protein tag (i.e., via protease cleavage) following purification.

[0247] Methods for directly purifying peptides from sources such as cellular or extracellular lysates are well-known in the art (see Harris and Angal, 1989). Such methods include, without limitation, sodium dodecylsulfate-polyacrylamide gel electrophoresis (SDS-PAGE), preparative disc-gel electrophoresis, isoelectric focusing, high-performance liquid chromatography (HPLC), reversed-phase HPLC, gel filtration, ion exchange and partition chromatography, countercurrent distribution, and combinations thereof. Peptides can be purified from many possible sources, for example, plasma, body tissues, or body fluid lysates derived from human or animal, including mammalian, bird, fish, and insect sources.

[0248] Antibody-based methods may also be used to purify peptides. Antibodies that recognize these peptides or fragments derived therefrom can be produced and isolated. The peptide can then be purified from a crude lysate by chromatography on an antibody-conjugated solid-phase matrix (see Harlow and Lane, 1998).

[0249] 2. Chemical Synthesis of Peptides

[0250] Alternately, peptides may be chemically synthesized by commercially available automated procedures, including, without limitation, exclusive solid phase synthesis, partial solid phase methods, fragment condensation or classical solution synthesis. The peptides are preferably prepared by solid-phase peptide synthesis; for example, as described by Merrifield (1965; 1997).

[0251] According to methods known in the art, peptides can be chemically synthesized by commercially available automated procedures, including, without limitation, exclusive solid phase synthesis, partial solid phase methods, fragment condensation, classical solution synthesis. In addition, recombinant and synthetic methods of peptide production can be combined to produce semi-synthetic peptides. The peptides of the invention are preferably prepared by solid phase peptide synthesis as described by Merrifield, 1963, J. Am. Chem. Soc. 85:2149; 1997. In one embodiment, synthesis is carried out with amino acids that are protected at the alpha-amino terminus. Trifunctional amino acids with labile side-chains are also protected with suitable groups to prevent undesired chemical reactions from occurring during the assembly of the peptides. The alpha-amino protecting group is selectively removed to allow subsequent reaction to take place at the amino-terminus. The conditions for the removal of the alpha-amino protecting group do not remove the side-chain protecting groups.

[0252] The alpha-amino protecting groups are those known to be useful in the art of stepwise peptide synthesis. Included are acyl type protecting groups, e.g., formyl, trifluoroacetyl, acetyl, aromatic urethane type protecting groups, e.g., benzyloxycarbonyl (Cbz), substituted benzyloxycarbonyl and 9-fluorenylmethyloxycarbonyl (Fmoc), aliphatic urethane protecting groups, e.g., t-butyloxycarbonyl (Boc), isopropyloxycarbonyl, cyclohexyloxycarbonyl, and alkyl type protecting groups, e.g., benzyl, triphenylmethyl. The preferred protecting group is Boc. The side-chain protecting groups for Tyr include tetrahydropyranyl, tert-butyl, trityl, benzyl, Cbz, 4-Br-Cbz and 2,6-dichlorobenzyl. The preferred side-chain protecting group for Tyr is 2,6-dichlorobenzyl. The side-chain protecting groups for Asp include benzyl, 2,6-dichlorobenzyl, methyl, ethyl, and cyclohexyl. The preferred side-chain protecting group for Asp is cyclohexyl. The side-chain protecting groups for Thr and Ser include acetyl, benzoyl, trityl, tetrahydropyranyl, benzyl, 2,6-dichlorobenzyl, and Cbz. The preferred protecting group for Thr and Ser is benzyl. The side-chain protecting groups for Arg include nitro, Tos, Cbz, adamantyloxycarbonyl, and Boc. The preferred protecting group for Arg is Tos. The side-chain amino group of Lys can be protected with Cbz, 2-Cl-Cbz, Tos, or Boc. The 2-Cl-Cbz group is the preferred protecting group for Lys.

[0253] The side-chain protecting groups selected must remain intact during coupling and not be removed during the deprotection of the amino-terminus protecting group or during coupling conditions. The side-chain protecting groups must also be removable upon the completion of synthesis, using reaction conditions that will not alter the finished peptide.

[0254] Solid phase synthesis is usually carried out from the carboxy-terminus by coupling the alpha-amino protected (side-chain protected) amino acid to a suitable solid support. An ester linkage is formed when the attachment is made to a chloromethyl or hydroxymethyl resin, and the resulting peptide will have a free carboxyl group at the C-terminus. Alternatively, when a benzhydrylamine or p-methylbenzhydrylamine resin is used, an amide bond is formed and the resulting peptide will have a carboxamide group at the C-terminus. These resins are commercially available, and their preparation has described by Stewart et al., 1984, Solid Phase Peptide Synthesis (2nd Edition), Pierce Chemical Co., Rockford, Ill.

[0255] The C-terminal amino acid, protected at the side chain if necessary and at the alpha-amino group, is coupled to the benzhydrylamine resin using various activating agents including dicyclohexylcarbodiimide (DCC), N,N′-diisopropyl-carbodiimide and carbonyldiimidazole. Following the attachment to the resin support, the alpha-amino protecting group is removed using trifluoroacetic acid (TFA) or HCl in dioxane at a temperature between 0 and 25° C. Dimethylsulfide is added to the TFA after the introduction of methionine (Met) to suppress possible S-alkylation. After removal of the alpha-amino protecting group, the remaining protected amino acids are coupled stepwise in the required order to obtain the desired sequence.

[0256] Various activating agents can be used for the coupling reactions including DCC, N,N′-diisopropyl-carbodiimide, benzotriazol-1-yl-oxy-tris-(dimethylamino) phosphonium hexa-fluorophosphate (BOP) and DCC-hydroxybenzotriazole (HOBt). Each protected amino acid is used in excess (>2.0 equivalents), and the couplings are usually carried out in N-methylpyrrolidone (NMP) or in DMF, CH₂Cl₂ or mixtures thereof. The extent of completion of the coupling reaction is monitored at each stage, e.g., by the ninhydrin reaction as described by Kaiser et al., 1970, Anal. Biochem. 34:595. In cases where incomplete coupling is found, the coupling reaction is repeated. The coupling reactions can be performed automatically with commercially available instruments.

[0257] After the entire assembly of the desired peptide, the peptide-resin is cleaved with a reagent such as liquid HF for 1-2 h at 0° C., which cleaves the peptide from the resin and removes all side-chain protecting groups. A scavenger such as anisole is usually used with the liquid HF to prevent cations formed during the cleavage from alkylating the amino acid residues present in the peptide. The peptide-resin can be deprotected with TFA/dithioethane prior to cleavage if desired.

[0258] Side-chain to side-chain cyclization on the solid support requires the use of an orthogonal protection scheme which enables selective cleavage of the side-chain functions of acidic amino acids (e.g., Asp) and the basic amino acids (e.g., Lys). The 9-fluorenylmethyl (Fm) protecting group for the side-chain of Asp and the 9-fluorenylmethyloxycarbonyl (Fmoc) protecting group for the side-chain of Lys can be used for this purpose. In these cases, the side-chain protecting groups of the Boc-protected peptide-resin are selectively removed with piperidine in DMF. Cyclization is achieved on the solid support using various activating agents including DCC, DCC/HOBt, or BOP. The HF reaction is carried out on the cyclized peptide-resin as described above.

[0259] 3. Peptide Libraries

[0260] Peptide libraries produced and screened according to the present invention are useful in providing new ligands for IR and IGF-1R. Peptide libraries can be designed and panned according to methods described in detail herein, and methods generally available to those in the art (see, e.g., U.S. Pat. No. 5,723,286 issued Mar. 3, 1998 to Dower et al.). In one aspect, commercially available phage display libraries can be used (e.g., RAPIDLIB® or GRABLIB®, DGI BioTechnologies, Inc., Edison, N.J.; Ph.D. C7C Disulfide Constrained Peptide Library, New England Biolabs). In another aspect, an oligonucleotide library can be prepared according to methods known in the art, and inserted into an appropriate vector for peptide expression. For example, vectors encoding a bacteriophage structural protein, preferably an accessible phage protein, such as a bacteriophage coat protein, can be used. Although one skilled in the art will appreciate that a variety of bacteriophage may be employed in the present invention, in preferred embodiments the vector is, or is derived from, a filamentous bacteriophage, such as, for example, f1, fd, Pf1, M13, etc. In particular, the fd-tet vector has been extensively described in the literature (see, e.g., Zacher et al., 1980, Gene 9:127-140; Smith et al., 1985, Science 228:1315-1317; Parmley and Smith, 1988, Gene 73:305-318).

[0261] The phage vector is chosen to contain or is constructed to contain a cloning site located in the 5′ region of the gene encoding the bacteriophage structural protein, so that the peptide is accessible to receptors in an affinity enrichment procedure as described hereinbelow. The structural phage protein is preferably a coat protein. An example of an appropriate coat protein is pill. A suitable vector may allow oriented cloning of the oligonucleotide sequences that encode the peptide so that the peptide is expressed at or within a distance of about 100 amino acid residues of the N-terminus of the mature coat protein. The coat protein is typically expressed as a preprotein, having a leader sequence.

[0262] Thus, desirably the oligonucleotide library is inserted so that the N-terminus of the processed bacteriophage outer protein is the first residue of the peptide, i.e., between the 3′-terminus of the sequence encoding the leader protein and the 5′-terminus of the sequence encoding the mature protein or a portion of the 5′ terminus. The library is constructed by cloning an oligonucleotide which contains the variable region of library members (and any spacers, as discussed below) into the selected cloning site. Using known recombinant DNA techniques (see generally, Sambrook et al., 1989, Molecular Cloning, A Laboratory Manual, 2d ed., Cold Spring Harbor Laboratory Press, Cold Spring Harbor, N.Y., 1989), an oligonucleotide may be constructed which, inter alia; 1) removes unwanted restriction sites and adds desired ones; 2) reconstructs the correct portions of any sequences which have been removed (such as a correct signal peptidase site, for example); 3) inserts the spacer residues, if any; and/or 4) corrects the translation frame (if necessary) to produce active, infective phage.

[0263] The central portion of the oligonucleotide will generally contain one or more IR and/or IGF-1R binding sequences and, optionally, spacer sequences. The sequences are ultimately expressed as peptides (with or without spacers) fused to or in the N-terminus of the mature coat protein on the outer, accessible surface of the assembled bacteriophage particles. The size of the library will vary according to the number of variable codons, and hence the size of the peptides, which are desired. Generally the library will be at least about 10⁶ members, usually at least 10⁷, and typically 10⁸ or more members. To generate the collection of oligonucleotides which forms a series of codons encoding a random collection of amino acids and which is ultimately cloned into the vector, a codon motif is used, such as (NNK)ₓ, where N may be A, C, G, or T (nominally equimolar), K is G or T (nominally equimolar), and x is typically up to about 5, 6, 7, 8, or more, thereby producing libraries of penta-, hexa-, hepta-, and octa-peptides or larger. The third position may also be G or C, designated “S”. Thus, NNK or NNS 1) code for all the amino acids; 2) code for only one stop codon; and 3) reduce the range of codon bias from 6:1 to 3:1.

[0264] It should be understood that, with longer peptides, the size of the library that is generated may become a constraint in the cloning process. The expression of peptides from randomly generated mixtures of oligonucleotides in appropriate recombinant vectors is known in the art (see, e.g., Oliphant et al., Gene 44:177-183). For example, the codon motif (NNK)₆ produces 32 codons, one for each of 12 amino acids, two for each of five amino acids, three for each of three amino acids and one (amber) stop codon. Although this motif produces a codon distribution as equitable as available with standard methods of oligonucleotide synthesis, it results in a bias against peptides containing one-codon residues. In particular, a complete collection of hexacodons contains one sequence encoding each peptide made up of only one-codon amino acids, but contains 729 (3⁶) sequences encoding each peptide with only three-codon amino acids.

[0265] An alternative approach to minimize the bias against one-codon residues involves the synthesis of 20 activated trinucleotides, each representing the codon for one of the 20 genetically encoded amino acids. These are synthesized by conventional means, removed from the support while maintaining the base and 5-OH-protecting groups, and activated by the addition of 3′O-phosphoramidite (and phosphate protection with b-cyanoethyl groups) by the method used for the activation of mononucleosides (see, generally, McBride and Caruthers, 1983, Tetrahedron Letters 22:245). Degenerate oligocodons are prepared using these trimers as building blocks. The trimers are mixed at the desired molar ratios and installed in the synthesizer. The ratios will usually be approximately equimolar, but may be a controlled unequal ratio to obtain the over- to under-representation of certain amino acids coded for by the degenerate oligonucleotide collection. The condensation of the trimers to form the oligocodons is done essentially as described for conventional synthesis employing activated mononucleosides as building blocks (see, e.g., Atkinson and Smith, 1984, Oligonucleotide Synthesis, M. J. Gait, Ed., p. 35-82). This procedure generates a population of oligonucleotides for cloning that is capable of encoding an equal distribution (or a controlled unequal distribution) of the possible peptide sequences. Advantageously, this approach may be employed in generating longer peptide sequences, since the range of bias produced by the (NNK)₆ motif increases by three-fold with each additional amino acid residue.

[0266] When the codon motif is (NNK)₅, as defined above, and when x equals 8, there are 2.6×10¹⁰ possible octa-peptides. A library containing most of the octa-peptides may be difficult to produce. Thus, a sampling of the octa-peptides may be accomplished by constructing a subset library using up to about 10% of the possible sequences, which subset of recombinant bacteriophage particles is then screened. If desired, to extend the diversity of a subset library, the recovered phage subset may be subjected to mutagenesis and then subjected to subsequent rounds of screening. This mutagenesis step may be accomplished in two general ways: the variable region of the recovered phage may be mutagenized, or additional variable amino acids may be added to the regions adjoining the initial variable sequences.

[0267] To diversify around active peptides (i.e., binders) found in early rounds of panning, the positive phage can sequenced to determine the identity of the active peptides. Oligonucleotides can then be synthesized based on these peptide sequences. The syntheses are done with a low level of all bases incorporated at each step to produce slight variations of the primary oligonucleotide sequences. This mixture of (slightly) degenerate oligonucleotides can then be cloned into the affinity phage by methods known to those in the art. This method produces systematic, controlled variations of the starting peptide sequences as part of a secondary library. It requires, however, that individual positive phage be sequenced before mutagenesis, and thus is useful for expanding the diversity of small numbers of recovered phage.

[0268] An alternate approach to diversify the selected phage allows the mutagenesis of a pool, or subset, of recovered phage. In accordance with this approach, phage recovered from panning are pooled and single stranded DNA is isolated. The DNA is mutagenized by treatment with, e.g., nitrous acid, formic acid, or hydrazine. These treatments produce a variety of damage to the DNA. The damaged DNA is then copied with reverse transcriptase, which misincorporates bases when it encounters a site of damage. The segment containing the sequence encoding the receptor-binding peptide is then isolated by cutting with restriction nuclease(s) specific for sites flanking the peptide coding sequence. This mutagenized segment is then recloned into undamaged vector DNA, the DNA is transformed into cells, and a secondary library according to known methods. General mutagenesis methods are known in the art (see Myers et al., 1985, Nucl. Acids Res. 13:3131-3145; Myers et al., 1985, Science 229:242-246; Myers, 1989, Current Protocols in Molecular Biology Vol. I, 8.3.1-8.3.6, F. Ausubel et al., eds, J. Wiley and Sons, New York).

[0269] In another general approach, the addition of amino acids to a peptide or peptides found to be active, can be carried out using various methods. In one, the sequences of peptides selected in early panning are determined individually and new oligonucleotides, incorporating the determined sequence and an adjoining degenerate sequence, are synthesized. These are then cloned to produce a secondary library. Alternatively, methods can be used to add a second IR or IGF-1R binding sequence to a pool of peptide-bearing phage. In accordance with one method, a restriction site is installed next to the first IR or IGF-1R binding sequence. Preferably, the enzyme should cut outside of its recognition sequence. The recognition site may be placed several bases from the first binding sequence. To insert a second IR or IGF-1R binding sequence, the pool of phage DNA is digested and blunt-ended by filling in the overhang with Klenow fragment. Double-stranded, blunt-ended, degenerately synthesized oligonucleotides are then ligated into this site to produce a second binding sequence juxtaposed to the first binding sequence. This secondary library is then amplified and screened as before.

[0270] While in some instances it may be appropriate to synthesize longer peptides to bind certain receptors, in other cases it may be desirable to provide peptides having two or more IR or IGF-1R binding sequences separated by spacer (e.g., linker) residues. For example, the binding sequences may be separated by spacers that allow the regions of the peptides to be presented to the receptor in different ways. The distance between binding regions may be as little as 1 residue, or at least 2-20 residues, or up to at least 100 residues. Preferred spacers are 3, 6, 9, 12, 15, or 18 residues in length. For probing large binding sites or tandem binding sites (e.g., Site 1 and Site 2 of IR), the binding regions may be separated by a spacer of residues of up to 20 to 30 amino acids. The number of spacer residues when present will typically be at least 2 residues, and often will be less than 20 residues.

[0271] The oligonucleotide library may have binding sequences which are separated by spacers (e.g., linkers), and thus may be represented by the formula: (NNK)y−(abc)ₙ−(NNK)_{z} where N and K are as defined previously (note that S as defined previously may be substituted for K), and y+z is equal to about 5, 6, 7, 8, or more, a, b and c represent the same or different nucleotides comprising a codon encoding spacer amino acids, n is up to about 3, 6, 9, or 12 amino acids, or more. The spacer residues may be somewhat flexible, comprising oligo-glycine, or oligo-glycine-glycine-serine, for example, to provide the diversity domains of the library with the ability to interact with sites in a large binding site relatively unconstrained by attachment to the phage protein. Rigid spacers, such as, e.g., oligo-proline, may also be inserted separately or in combination with other spacers, including glycine spacers. It may be desired to have the IR or IGF-1R binding sequences close to one another and use a spacer to orient the binding sequences with respect to each other, such as by employing a turn between the two sequences, as might be provided by a spacer of the sequence glycine-proline-glycine, for example. To add stability to such a turn, it may be desirable or necessary to add cysteine residues at either or both ends of each variable region. The cysteine residues would then form disulfide bridges to hold the variable regions together in a loop, and in this fashion may also serve to mimic a cyclic peptide. Of course, those skilled in the art will appreciate that various other types of covalent linkages for cyclization may also be used.

[0272] Spacer residues as described above may also be situated on either or both ends of the IR or IGF-1R binding sequences. For instance, a cyclic peptide may be designed without an intervening spacer, by having a cysteine residue on both ends of the peptide. As described above, flexible spacers, e.g., oligo-glycine, may facilitate interaction of the peptide with the selected receptors. Alternatively, rigid spacers may allow the peptide to be presented as if on the end of a rigid arm, where the number of residues, e.g., proline residues, determines not only the length of the arm but also the direction for the arm in which the peptide is oriented. Hydrophilic spacers, made up of charged and/or uncharged hydrophilic amino acids, (e.g., Thr, His, Asn, Gln, Arg, Glu, Asp, Met, Lys, etc.), or hydrophobic spacers of hydrophobic amino acids (e.g., Phe, Leu, Ile, Gly, Val, Ala, etc.) may be used to present the peptides to receptor binding sites with a variety of local environments.

[0273] Notably, some peptides, because of their size and/or sequence, may cause severe defects in the infectivity of their carrier phage. This causes a loss of phage from the population during reinfection and amplification following each cycle of panning. To minimize problems associated with defective infectivity, DNA prepared from the eluted phage can be transformed into appropriate host cells, such as, e.g., E. coli, preferably by electroporation (see, e.g., Dower et al., Nucl. Acids Res. 16:6127-6145), or well-known chemical means. The cells are cultivated for a period of time sufficient for marker expression, and selection is applied as typically done for DNA transformation. The colonies are amplified, and phage harvested for affinity enrichment in accordance with established methods. Phage identified in the affinity enrichment may be re-amplified by infection into the host cells. The successful transformants are selected by growth in an appropriate antibiotic(s), e.g., tetracycline or ampicillin. This may be done on solid or in liquid growth medium.

[0274] For growth on solid medium, the cells are grown at a high density (about 10⁸ to 10⁹ transformants per m²) on a large surface of, for example, L-agar containing the selective antibiotic to form essentially a confluent lawn. The cells and extruded phage are scraped from the surface and phage are prepared for the first round of panning (see, e.g., Parmley and Smith, 1988, Gene 73:305-318). For growth in liquid culture, cells may be grown in L-broth and antibiotic through about 10 or more doublings. The phage are harvested by standard procedures (see Sambrook et al., 1989, Molecular Cloning, 2^{nd} ed.). Growth in liquid culture may be more convenient because of the size of the libraries, while growth on solid media likely provides less chance of bias during the amplification process.

[0275] For affinity enrichment of desired clones, generally about 10³ to 10⁴ library equivalents (a library equivalent is one of each recombinant; 10⁴ equivalents of a library of 10⁹ members is 10⁹×10⁴=10¹³ phage), but typically at least 10² library equivalents, up to about 10⁵ to 10⁶, are incubated with a receptor (or portion thereof) to which the desired peptide is sought. The receptor is in one of several forms appropriate for affinity enrichment schemes. In one example the receptor is immobilized on a surface or particle, and the library of phage bearing peptides is then panned on the immobilized receptor generally according to procedures known in the art. In an alternate scheme, a receptor is attached to a recognizable ligand (which may be attached via a tether). A specific example of such a ligand is biotin. The receptor, so modified, is incubated with the library of phage and binding occurs with both reactants in solution. The resulting complexes are then bound to streptavidin (or avidin) through the biotin moiety. The streptavidin may be immobilized on a surface such as a plastic plate or on particles, in which case the complexes (phage/peptide/receptor/biotin/streptavidin) are physically retained; or the streptavidin may be labeled, with a fluorophor, for example, to tag the active phage/peptide for detection and/or isolation by sorting procedures, e.g., on a fluorescence-activated cell sorter.

[0276] Phage that associate with IR or IGF-1R via non-specific interactions are removed by washing. The degree and stringency of washing required will be determined for each receptor/peptide of interest. A certain degree of control can be exerted over the binding characteristics of the peptides recovered by adjusting the conditions of the binding incubation and the subsequent washing. The temperature, pH, ionic strength, divalent cation concentration, and the volume and duration of the washing will select for peptides within particular ranges of affinity for the receptor. Selection based on slow dissociation rate, which is usually predictive of high affinity, is the most practical route. This may be done either by continued incubation in the presence of a saturating amount of free ligand, or by increasing the volume, number, and length of the washes. In each case, the rebinding of dissociated peptide-phage is prevented, and with increasing time, peptide-phage of higher and higher affinity are recovered. Additional modifications of the binding and washing procedures may be applied to find peptides that bind receptors under special conditions. Once a peptide sequence that imparts some affinity and specificity for the receptor molecule is known, the diversity around this binding motif may be embellished. For instance, variable peptide regions may be placed on one or both ends of the identified sequence. The known sequence may be identified from the literature, or may be derived from early rounds of panning in the context of the present invention.

[0277] G. Screening Assays

[0278] In another embodiment of this invention, screening assays to identify pharmacologically active ligands at IR and/or IGF-1R are provided. Ligands may encompass numerous chemical classes, though typically they are organic molecules, preferably small organic compounds having a molecular weight of more than 50 and less than about 2,500 daltons. Such ligands can comprise functional groups necessary for structural interaction with proteins, particularly hydrogen bonding, and typically include at least an amine, carbonyl, hydroxyl or carboxyl group, preferably at least two of the functional chemical groups. Ligands often comprise cyclical carbon or heterocyclic structures and/or aromatic or polyaromatic structures substituted with one or more of the above functional groups. Ligands can also comprise biomolecules including peptides, saccharides, fatty acids, steroids, purines, pyrimidines, derivatives, structural analogs, or combinations thereof.

[0279] Ligands may include, for example, 1) peptides such as soluble peptides, including Ig-tailed fusion peptides and members of random peptide libraries (see, e.g., Lam et al., 1991, Nature 354:82-84; Houghten et al., 1991, Nature 354:84-86) and combinatorial chemistry-derived molecular libraries made of D- and/or L-configuration amino acids; 2) phosphopeptides (e.g., members of random and partially degenerate, directed phosphopeptide libraries, see, e.g., Songyang et al., 1993, Cell 72:767-778); 3) antibodies (e.g., polyclonal, monoclonal, humanized, anti-idiotypic, chimeric, and single chain antibodies as well as Fab, F(ab′)₂, Fab expression library fragments, and epitope-binding fragments of antibodies); and 4) small organic and inorganic molecules.

[0280] Ligands can be obtained from a wide variety of sources including libraries of synthetic or natural compounds. Synthetic compound libraries are commercially available from, for example, Maybridge Chemical Co. (Trevillet, Cornwall, UK), Comgenex (Princeton, N.J.), Brandon Associates (Merrimack, N.H.), and Microsource (New Milford, Conn.). A rare chemical library is available from Aldrich Chemical Company, Inc. (Milwaukee, Wis.). Natural compound libraries comprising bacterial, fungal, plant or animal extracts are available from, for example, Pan Laboratories (Bothell, Wash.). In addition, numerous means are available for random and directed synthesis of a wide variety of organic compounds and biomolecules, including expression of randomized oligonucleotides.

[0281] Alternatively, libraries of natural compounds in the form of bacterial, fungal, plant and animal extracts can be readily produced. Methods for the synthesis of molecular libraries are readily available (see, e.g., DeWitt et al., 1993, Proc. Natl. Acad. Sci. USA 90:6909; Erb et al., 1994, Proc. Natl. Acad. Sci. USA 91:11422; Zuckermann et al., 1994, J. Med. Chem. 37:2678; Cho et al., 1993, Science 261:1303; Carell et al., 1994, Angew. Chem. Int. Ed. Engl. 33:2059; Carell et al., 1994, Angew. Chem. Int Ed. Engl. 33:2061; and in Gallop et al., 1994, J. Med. Chem. 37:1233). In addition, natural or synthetic compound libraries and compounds can be readily modified through conventional chemical, physical and biochemical means (see, e.g., Blondelle et al., 1996, Trends in Biotech. 14:60), and may be used to produce combinatorial libraries. In another approach, previously identified pharmacological agents can be subjected to directed or random chemical modifications, such as acylation, alkylation, esterification, amidification, and the analogs can be screened for IR-modulating activity.

[0282] Numerous methods for producing combinatorial libraries are known in the art, including those involving biological libraries; spatially addressable parallel solid phase or solution phase libraries; synthetic library methods requiring deconvolution; the ‘one-bead one-compound’ library method; and synthetic library methods using affinity chromatography selection. The biological library approach is limited to polypeptide or peptide libraries, while the other four approaches are applicable to polypeptide, peptide, non-peptide oligomer, or small molecule libraries of compounds (K. S. Lam, 1997, Anticancer Drug Des. 12:145).

[0283] Libraries may be screened in solution by methods generally known in the art for determining whether ligands competitively bind at a common binding site. Such methods may including screening libraries in solution (e.g., Houghten, 1992, Biotechniques 13:412-421), or on beads (Lam, 1991, Nature 354:82-84), chips (Fodor, 1993, Nature 364:555-556), bacteria or spores (Ladner U.S. Pat. No. 5,223,409), plasmids (Cull et al., 1992, Proc. Natl. Acad. Sci. USA 89:1865-1869), or on phage (Scott and Smith, 1990, Science 249:386-390; Devlin, 1990, Science 249:404-406; Cwirla et al., 1990, Proc. Natl. Acad. Sci. USA 97:6378-6382; Felici, 1991, J. Mol. Biol. 222:301-310; Ladner, supra).

[0284] Where the screening assay is a binding assay, IR, or one of the IR-binding peptides disclosed herein, may be joined to a label, where the label can directly or indirectly provide a detectable signal. Various labels include radioisotopes, fluorescent molecules, chemiluminescent molecules, enzymes, specific binding molecules, particles, e.g., magnetic particles, and the like. Specific binding molecules include pairs, such as biotin and streptavidin, digoxin and antidigoxin, etc. For the specific binding members, the complementary member would normally be labeled with a molecule that provides for detection, in accordance with known procedures.

[0285] A variety of other reagents may be included in the screening assay. These include reagents like salts, neutral proteins, e.g., albumin, detergents, etc., which are used to facilitate optimal protein-protein binding and/or reduce non-specific or background interactions. Reagents that improve the efficiency of the assay, such as protease inhibitors, nuclease inhibitors, anti-microbial agents, etc., may be used. The components are added in any order that produces the requisite binding. Incubations are performed at any temperature that facilitates optimal activity, typically between 40 and 40° C. Incubation periods are selected for optimum activity, but may also be optimized to facilitate rapid high-throughput screening. Normally, between 0.1 and 1 h will be sufficient. In general, a plurality of assay mixtures is run in parallel with different test agent concentrations to obtain a differential response to these concentrations. Typically, one of these concentrations serves as a negative control, i.e., at zero concentration or below the level of detection.

[0286] The screening assays provided in accordance with this invention are based on those disclosed in International application WO 96/04557, which is incorporated herein in its entirety. Briefly, WO 96/04557 discloses the use of reporter peptides that bind to active sites on targets and possess agonist or antagonist activity at the target. These reporters are identified from recombinant libraries and are either peptides with random amino acid sequences or variable antibody regions with at least one CDR region that has been randomized (rVab). The reporter peptides may be expressed in cell recombinant expression systems, such as for example in E. coli, or by phage display (see WO 96/04557 and Kay et al. 1996, Mol. Divers. 1(2):139-40, both of which are incorporated herein by reference). The reporters identified from the libraries may then be used in accordance with this invention either as therapeutics themselves, or in competition binding assays to screen for other molecules, preferably small, active molecules, which possess similar properties to the reporters and may be developed as drug candidates to provide agonist or antagonist activity. Preferably, these small organic molecules are orally active.

[0287] The basic format of an in vitro competitive receptor binding assay as the basis of a heterogeneous screen for small organic molecular replacements for insulin may be as follows: occupation of the active site of IR is quantified by time-resolved fluorometric detection (TRFD) with streptavidin-labeled europium (saEu) complexed to biotinylated peptides (bP). In this assay, saEu forms a ternary complex with bP and IR (i.e., IR:bP:saEu complex). The TRFD assay format is well-established, sensitive, and quantitative (Tompkins et al., 1993, J. Immunol. Methods 163:209-216). The assay can use a single-chain antibody or a biotinylated peptide. Furthermore, both assay formats faithfully report the competition of the biotinylated ligands binding to the active site of IR by insulin.

[0288] In these assays, soluble IR is coated on the surface of microtiter wells, blocked by a solution of 0.5% bovine serum albumin (BSA) and 2% non-fat milk in PBS, and then incubated with biotinylated peptide or rVab. Unbound bP is then washed away and saEu is added to complex with receptor-bound bP. Upon addition of the acidic enhancement solution, the bound europium is released as free Eu³⁺ which rapidly forms a highly fluorescent and stable complex with components of the enhancement solution. The IR:bP bound saEu is then converted into its highly fluorescent state and detected by a detector such as Wallac Victor II (EG&G Wallac, Inc.)

[0289] Phage display libraries can also be screened for ligands that bind to IR or IGF-1R, as described above. Details of the construction and analyses of these libraries, as well as the basic procedures for biopanning and selection of binders, have been published (see, e.g., WO 96/04557; Mandecki et al., 1997, Display Technologies—Novel Targets and Strategies, P. Guttry (ed), International Business Communications, Inc. Southborogh, Mass., pp. 231-254; Ravera et al., 1998, Oncogene 16:1993-1999; Scott and Smith, 1990, Science 249:386-390); Grihalde et al., 1995, Gene 166:187-195; Chen et al., 1996, Proc. Natl. Acad. Sci. USA 93:1997-2001; Kay et al., 1993, Gene 128:59-65; Carcamo et al., 1998, Proc. Natl. Acad. Sci. USA 95:11146-11151; Hoogenboom, 1997, Trends Biotechnol. 15:62-70; Rader and Barbas, 1997, Curr. Opin. Biotechnol. 8:503-508; all of which are incorporated herein by reference).

[0290] The designing of mimetics to a known pharmaceutically active compound is a known approach to the development of pharmaceuticals based on a “lead” compound. This might be desirable where the active compound is difficult or expensive to synthesize or where it is unsuitable for a particular method of administration, e.g., peptides are generally unsuitable active agents for oral compositions as they tend to be quickly degraded by proteases in the alimentary canal. Mimetic design, synthesis, and testing are generally used to avoid large-scale screening of molecules for a target property.

[0291] There are several steps commonly taken in the design of a mimetic from a compound having a given target property. First, the particular parts of the compound that are critical and/or important in determining the target property are determined. In the case of a peptide, this can be done by systematically varying the amino acid residues in the peptide (e.g., by substituting each residue in turn). These parts or residues constituting the active region of the compound are known as its “pharmacophore”.

[0292] Once the pharmacophore has been found, its structure is modeled according to its physical properties (e.g., stereochemistry, bonding, size, and/or charge), using data from a range of sources (e.g., spectroscopic techniques, X-ray diffraction data, and NMR). Computational analysis, similarity mapping (which models the charge and/or volume of a pharmacophore, rather than the bonding between atoms), and other techniques can be used in this modeling process.

[0293] In a variant of this approach, the three dimensional structure of the ligand and its binding partner are modeled. This can be especially useful where the ligand and/or binding partner change conformation on binding, allowing the model to take account of this in the design of the mimetic.

[0294] A template molecule is then selected, and chemical groups that mimic the pharmacophore can be grafted onto the template. The template molecule and the chemical groups grafted on to it can conveniently be selected so that the mimetic is easy to synthesize, is likely to be pharmacologically acceptable, does not degrade in vivo, and retains the biological activity of the lead compound. The mimetics found are then screened to ascertain the extent they exhibit the target property, or to what extent they inhibit it. Further optimization or modification can then be carried out to arrive at one or more final mimetics for in vivo or clinical testing.

[0295] This invention provides specific IR and IGF-1R amino acid sequences that function as either agonists or antagonists at IR and/or IGF-1R. Additional sequences may be obtained in accordance with the procedures described herein.

[0296] H. Use of the Peptides Provided by this Invention

[0297] The IR and IGF-1R agonist and antagonist peptides provided by this invention are useful as lead compounds for identifying other more potent or selective therapeutics, assay reagents for identifying other useful ligands by, for example, competition screening assays, as research tools for further analysis of IR and IGF-1R, and as potential therapeutics in pharmaceutical compositions. In one embodiment, one or more of the disclosed peptides can be provided as components in a kit for identifying other ligands (e.g., small, organic molecules) that bind to IR or IGF-1R. Such kits may also comprise IR or IGF-1R, or functional fragments thereof. The peptide and receptor components of the kit may be labeled (e.g., by radioisotopes, fluorescent molecules, chemiluminescent molecules, enzymes or other labels), or may be unlabeled and labeling reagents may be provided. The kits may also contain peripheral reagents such as buffers, stabilizers, etc. Instructions for use can also be provided.

[0298] In another embodiment, the peptide sequences provided by this invention can be used to design secondary peptide libraries, which are derived from the peptide sequences, and include members that bind to Site 1 and/or Site 2 of IR or IGF-1R. Such libraries can be used to identify sequence variants that increase or otherwise modulate the binding and/or activity of the original peptide at IR or IGF-1R, as described in the related applications of Beasley et al. International Application PCT/US00/08528, filed Mar. 29, 2000, and Beasley et al., U.S. application Ser. No. 09/538,038, filed Mar. 29, 2000, in accordance with well-established techniques.

[0299] IR agonist amino acid sequences provided by this invention are useful as insulin analogs and may therefore be developed as treatments for diabetes or other diseases associated with a decreased response or production of insulin. For use as an insulin supplement or replacement, amino acid sequences include D117/H2C: FHENFYDWFVRQVSK (SEQ ID NO:1780); D117/H2C minus terminal lysine: FHENFYDWFVRQVS (SEQ ID NO:1557); D118: DYKDFYDAIQLVRSARAGGTRDKK (SEQ ID NO:1781); D118 minus FLAG® tag and terminal lysines: FYDAIQLVRSARAGGTRD (SEQ ID NO:1782); D119: KDRAFYNGLRDLVGAVYGAWDKK (SEQ ID NO:1733); D119 minus terminal lysines: KDRAFYNGLRDLVGAVYGAWD (residues 1-21 of SEQ ID NO:1733); D116/JBA5: DYKDLCQSWGVRIGWLAGLCPKK (SEQ ID NO:1541); D116/JBA5 minus FLAG® tag and terminal lysines: LCQSWGVRIGWLAGLCP (SEQ ID NO:1542); D113/H2: DYKDVTFTSAVFHENFYDWFVRQVSKK (SEQ ID NO:1783); D113/H2 minus FLAG® tag and terminal lysines: VTFTSAVFHENFYDWFVRQVS (SEQ ID NO:1784); and S175: GRVDWLQRNANFYDWFVAELG (SEQ ID NO:1560). Preferred peptide dimer sequences are represented by S325, S332, S333, S335, S337, S353, S374-S376, S378, S379, S381, S414, S415, and S418 (see Table 7). Other preferred dimers sequences are represented by S455, S457, S458, S467, S468, S471, S499, S510, S518, S519, and S520 sequences (see Table 7). Especially preferred is the S519 dimer sequence, which shows in vitro and in vivo activity comparable to insulin (see FIGS. 31A-C, 32A-B, and 33).

[0300] IGF-1R antagonist amino acid sequences provided by this invention are useful as treatments for cancers, including, but not limited to, breast, prostate, colorectal, and ovarian cancers. Human and breast cancers are responsible for over 40,000 deaths per year, as present treatments such as surgery, chemotherapy, radiation therapy, and immunotherapy show limited success. The IGF-1R antagonist amino acid sequences disclosed herein are also useful for the treatment or prevention of diabetic retinopathy. Recent reports have shown that a previously identified IGF-1R antagonist can suppress retinal neovascularization, which causes diabetic retinopathy (Smith et al., 1999, Nat. Med. 5:1390-1395). Preferred IGF-1R antagonist amino acid sequences include those comprising the sequences of RP33-IGF and RP33K-IGF (Tables 24-26).

[0301] IGF-1R agonist amino acid sequences provided by this invention are useful for development as treatments for neurological disorders, including stroke and diabetic neuropathy. Reports of several different groups implicate IGF-1R in the reduction of global brain ischemia, and support the use of IGF-1 for the treatment of diabetic neuropathy (reviewed in Auer et al., 1998, Neurology 51:S39-S43; Apfel, 1999, Am. J. Med. 107:34S-42S). The IGF-1R agonist peptides of the invention may be useful for enhancing the survival of cells and/or blocking apoptosis in cells. Preferred IGF-1R agonist amino acid sequences include those comprising the sequences of G33, RP48, RP60, and RP30-IGF-12-RP31-IGF (Tables 27-29).

[0302] I. Methods of Administration

[0303] The amino acid sequences of this invention may be administered as pharmaceutical compositions comprising standard carriers known in the art for delivering proteins and peptides and by gene therapy. Preferably, a pharmaceutical composition includes, in admixture, a pharmaceutically (i.e., physiologically) acceptable carrier, excipient, or diluent, and one or more of an IR or IGF-1R agonist or antagonist peptide, as an active ingredient. The preparation of pharmaceutical compositions that contain peptides as active ingredients is well understood in the art. Typically, such compositions are prepared as injectables, either as liquid solutions or suspensions, however, solid forms suitable for solution in, or suspension in, liquid prior to injection can also be prepared. The preparation can also be emulsified. The active therapeutic ingredient is often mixed with excipients that are pharmaceutically (i.e., physiologically) acceptable and compatible with the active ingredient. Suitable excipients are, for example, water, saline, dextrose, glycerol, ethanol, or the like and combinations thereof. In addition, if desired, the composition can contain minor amounts of auxiliary substances such as wetting or emulsifying agents, pH-buffering agents, which enhance the effectiveness of the active ingredient.

[0304] An IR or IGF-1R agonist or antagonist peptide can be formulated into a pharmaceutical composition as neutralized physiologically acceptable salt forms. Suitable salts include the acid addition salts (i.e., formed with the free amino groups of the peptide molecule) and which are formed with inorganic acids such as, for example, hydrochloric or phosphoric acids, or such organic acids as acetic, oxalic, tartaric, mandelic, and the like. Salts formed from the free carboxyl groups can also be derived from inorganic bases such as, for example, sodium, potassium, ammonium, calcium, or ferric hydroxides, and such organic bases as isopropylamine, trimethylamine, 2-ethylamino ethanol, histidine, procaine, and the like.

[0305] The pharmaceutical compositions can be administered systemically by oral or parenteral routes. Non-limiting parenteral routes of administration include subcutaneous, intramuscular, intraperitoneal, intravenous, transdermal, inhalation, intranasal, intra-arterial, intrathecal, enteral, sublingual, or rectal. Due to the labile nature of the amino acid sequences parenteral administration is preferred. Preferred modes of administration include aerosols for nasal or bronchial absorption; suspensions for intravenous, intramuscular, intrasternal or subcutaneous, injection; and compounds for oral administration.

[0306] Intravenous administration, for example, can be performed by injection of a unit dose. The term “unit dose” when used in reference to a pharmaceutical composition of the present invention refers to physically discrete units suitable as unitary dosage for humans, each unit containing a predetermined quantity of active material calculated to produce the desired therapeutic effect in association with the required diluent; i.e., liquid used to dilute a concentrated or pure substance (either liquid or solid), making that substance the correct (diluted) concentration for use. For injectable administration, the composition is in sterile solution or suspension or may be emulsified in pharmaceutically- and physiologically-acceptable aqueous or oleaginous vehicles, which may contain preservatives, stabilizers, and material for rendering the solution or suspension isotonic with body fluids (i.e., blood) of the recipient.

[0307] Excipients suitable for use are water, phosphate buffered saline, pH 7.4, 0.15 M aqueous sodium chloride solution, dextrose, glycerol, dilute ethanol, and the like, and mixtures thereof. Illustrative stabilizers are polyethylene glycol, proteins, saccharides, amino acids, inorganic acids, and organic acids, which may be used either on their own or as admixtures. The amounts or quantities, as well as routes of administration, used are determined on an individual basis, and correspond to the amounts used in similar types of applications or indications known to those of skill in the art.

[0308] Pharmaceutical compositions are administered in a manner compatible with the dosage formulation, and in a therapeutically effective amount. The quantity to be administered depends on the subject to be treated, capacity of the subject's immune system to utilize the active ingredient, and degree of modulation of IR or IGF-1R activity desired. Precise amounts of active ingredient required to be administered depend on the judgment of the practitioner and are specific for each individual. However, suitable dosages may range from about 10 to 200 nmol active peptide per kilogram body weight of individual per day and depend on the route of administration. Suitable regimes for initial administration and booster shots are also variable, but are typified by an initial administration followed by repeated doses at one or more hour intervals by a subsequent injection or other administration. Alternatively, continuous intravenous infusions sufficient to maintain picomolar concentrations (e.g., approximately 1 pM to approximately 10 nM) in the blood are contemplated. An exemplary formulation comprises the IR or IGF-1R agonist or antagonist peptide in a mixture with sodium busulfite USP (3.2 mg/ml); disodium edetate USP (0.1 mg/ml); and water for injection q.s.a.d. (1 ml).

[0309] Further guidance in preparing pharmaceutical formulations can be found in, e.g., Gilman et al. (eds), 1990, Goodman and Gilman's: The Pharmacological Basis of Therapeutics, 8th ed., Pergamon Press; and Remington's Pharmaceutical Sciences, 17th ed., 1990, Mack Publishing Co., Easton, Pa.; Avis et al. (eds), 1993, Pharmaceutical Dosage Forms: Parenteral Medications, Dekker, New York; Lieberman et al. (eds), 1990, Pharmaceutical Dosage Forms: Disperse Systems, Dekker, New York.

[0310] The present invention further contemplates compositions comprising an IR or IGF-1R agonist or antagonist peptide, and a physiologically acceptable carrier, excipient, or diluent as described in detail herein.

[0311] The constructs as described herein may also be used in gene transfer and gene therapy methods to allow the expression of one or more amino acid sequences of the present invention. The amino acid sequences of the present invention can be used for gene therapy and thereby provide an alternative method of treating diabetes which does not rely on the administration or expression of insulin. Expressing insulin for use in gene therapy requires the expression of a precursor product, which must then undergo processing including cleavage and disulfide bond formation to form the active product. The amino acid sequences of this invention, which possess activity, are relatively small, and thus do not require the complex processing steps to become active. Accordingly, these sequences provide a more suitable product for gene therapy.

[0312] Gene transfer systems known in the art may be useful in the practice of the gene therapy methods of the present invention. These include viral and non-viral transfer methods. A number of viruses have been used as gene transfer vectors, including polyoma, i.e., SV40 (Madzak et al., 1992, J. Gen. Virol., 73:1533-1536), adenovirus (Berkner, 1992, Curr. Top. Microbiol. Immunol., 158:39-6; Berkner et al., 1988, Bio Techniques, 6:616-629; Gorziglia et al., 1992, J. Virol., 66:4407-4412; Quantin et al., 1992, Proc. Natl. Acad. Sci. USA, 89:2581-2584; Rosenfeld et al., 1992, Cell, 68:143-155; Wilkinson et al., 1992, Nucl. Acids Res., 20:2233-2239; Stratford-Perricaudet et al., 1990, Hum. Gene Ther., 1:241-256), vaccinia virus (Mackeft et al., 1992, Biotechnology, 24:495-499), adeno-associated virus (Muzyczka, 1992, Curr. Top. Microbiol. Immunol. 158:91-123; Ohi et al., 1990, Gene, 89:279-282), herpes viruses including HSV and EBV (Margolskee, 1992, Curr. Top. Microbiol. Immunol. 158:67-90; Johnson et al., 1992, J. Virol., 66:2952-2965; Fink et al., 1992, Hum. Gene Ther. 3:11-19; Breakfield et al., 1987, Mol. Neurobiol., 1:337-371; Fresse et al., 1990, Biochem. Pharmacol. 40:2189-2199), and retroviruses of avian (Brandyopadhyay et al., 1984, Mol. Cell Biol., 4:749-754; Petropouplos et al., 1992, J. Virol., 66:3391-3397), murine (Miller, 1992, Curr. Top. Microbiol. Immunol. 158:1-24; Miller et al., 1985, Mol. Cell Biol., 5:431-437; Sorge et al., 1984, Mol. Cell Biol., 4:1730-1737; Mann et al., 1985, J. Virol., 54:401-407), and human origin (Page et al., 1990, J. Virol., 64:5370-5276; Buchschalcher et al., 1992, J. Virol., 66:2731-2739). Most human gene therapy protocols have been based on disabled murine retroviruses.

[0313] Non-viral gene transfer methods known in the art include chemical techniques such as calcium phosphate coprecipitation (Graham et al., 1973, Virology, 52:456-467; Pellicer et al., 1980, Science, 209:1414-1422), mechanical techniques, for example microinjection (Anderson et al., 1980, Proc. Natl. Acad. Sci. USA, 77:5399-5403; Gordon et al., 1980, Proc. Natl. Acad. Sci. USA, 77:7380-7384; Brinster et al., 1981, Cell, 27:223-231; Constantini et al., 1981, Nature, 294:92-94), membrane fusion-mediated transfer via liposomes (Felgner et al., 1987, Proc. Natl. Acad. Sci. USA, 84:7413-7417; Wang et al., 1989, Biochemistry, 28:9508-9514; Kaneda et al., 1989, J. Biol. Chem., 264:12126-12129; Stewart et al., 1992, Hum. Gene Ther. 3:267-275; Nabel et al., 1990, Science, 249:1285-1288; Lim et al., 1992, Circulation, 83:2007-2011; U.S. Pat. Nos. 5,283,185 and 5,795,587), and direct DNA uptake and receptor-mediated DNA transfer (Wolff et al., 1990, Science, 247:1465-1468; Wu et al., 1991, BioTechniques, 11:474-485; Zenke et al., 1990, Proc. Natl. Acad. Sci. USA, 87:3655-3659; Wu et al., 1989, J. Biol. Chem., 264:16985-16987; Wolff et al., 1991, BioTechniques, 11:474-485; Wagner et al., 1991, Proc. Natl. Acad. Sci. USA, 88:4255-4259; Cotten et al., 1990, Proc. Natl. Acad. Sci. USA, 87:4033-4037; Curiel et al., 1991, Proc. Natl. Acad. Sci. USA, 88:8850-8854; Curiel et al., 1991, Hum. Gene Ther. 3:147-154).

[0314] Many types of cells and cell lines (e.g., primary cell lines or established cell lines) and tissues are capable of being stably transfected by or receiving the constructs of the invention. Examples of cells that may be used include, but are not limited to, stem cells, B lymphocytes, T lymphocytes, macrophages, other white blood lymphocytes (e.g., myelocytes, macrophages, or monocytes), immune system cells of different developmental stages, erythroid lineage cells, pancreatic cells, lung cells, muscle cells, liver cells, fat cells, neuronal cells, glial cells, other brain cells, transformed cells of various cell lineages corresponding to normal cell counterparts (e.g., K562, HEL, HL60, and MEL cells), and established or otherwise transformed cells lines derived from all of the foregoing. In addition, the constructs of the present invention may be transferred by various means directly into tissues, where they would stably integrate into the cells comprising the tissues. Further, the constructs containing the DNA sequences of the peptides of the invention can be introduced into primary cells at various stages of development, including the embryonic and fetal stages, so as to effect gene therapy at early stages of development.

[0315] In one approach, plasmid DNA is complexed with a polylysine-conjugated antibody specific to the adenovirus hexon protein, and the resulting complex is bound to an adenovirus vector. The trimolecular complex is then used to infect cells. The adenovirus vector permits efficient binding, internalization, and degradation of the endosome before the coupled DNA is damaged.

[0316] In another approach, liposome/DNA is used to mediate direct in vivo gene transfer. While in standard liposome preparations the gene transfer process is non-specific, localized in vivo uptake and expression have been reported in tumor deposits, for example, following direct in situ administration (Nabel, 1992, Hum. Gene Ther. 3:399-410).

[0317] Suitable gene transfer vectors possess a promoter sequence, preferably a promoter that is cell-specific and placed upstream of the sequence to be expressed. The vectors may also contain, optionally, one or more expressible marker genes for expression as an indication of successful transfection and expression of the nucleic acid sequences contained in the vector. In addition, vectors can be optimized to minimize undesired immunogenicity and maximize long-term expression of the desired gene product(s) (see Nabe, 1999, Proc. Natl. Acad. Sci. USA 96:324-326). Moreover, vectors can be chosen based on cell-type that is targeted for treatment.

[0318] Illustrative examples of vehicles or vector constructs for transfection or infection of the host cells include replication-defective viral vectors, DNA virus or RNA virus (retrovirus) vectors, such as adenovirus, herpes simplex virus and adeno-associated viral vectors. Adeno-associated virus vectors are single stranded and allow the efficient delivery of multiple copies of nucleic acid to the cell's nucleus. Preferred are adenovirus vectors. The vectors will normally be substantially free of any prokaryotic DNA and may comprise a number of different functional nucleic acid sequences. An example of such functional sequences may be a DNA region comprising transcriptional and translational initiation and termination regulatory sequences, including promoters (e.g., strong promoters, inducible promoters, and the like) and enhancers which are active in the host cells. Also included as part of the functional sequences is an open reading frame (polynucleotide sequence) encoding a protein of interest. Flanking sequences may also be included for site-directed integration. In some situations, the 5′-flanking sequence will allow homologous recombination, thus changing the nature of the transcriptional initiation region, so as to provide for inducible or non-inducible transcription to increase or decrease the level of transcription, as an example.

[0319] In general, the encoded and expressed peptide may be intracellular, i.e., retained in the cytoplasm, nucleus, or in an organelle, or may be secreted by the cell. For secretion, a signal sequence may be fused to the peptide sequence. As previously mentioned, a marker may be present for selection of cells containing the vector construct. The marker may be an inducible or non-inducible gene and will generally allow for positive selection under induction, or without induction, respectively. Examples of marker genes include neomycin, dihydrofolate reductase, glutamine synthetase, and the like. The vector employed will generally also include an origin of replication and other genes that are necessary for replication in the host cells, as routinely employed by those having skill in the art. As an example, the replication system comprising the origin of replication and any proteins associated with replication encoded by a particular virus may be included as part of the construct. The replication system must be selected so that the genes encoding products necessary for replication do not ultimately transform the cells. Such replication systems are represented by replication-defective adenovirus (see G. Acsadi et al., 1994, Hum. Mol. Genet. 3:579-584) and by Epstein-Barr virus. Examples of replication defective vectors, particularly, retroviral vectors that are replication defective, are BAG, (see Price et al., 1987, Proc. Natl. Acad. Sci. USA, 84:156; Sanes et al., 1986, EMBO J., 5:3133). It will be understood that the final gene construct may contain one or more genes of interest, for example, a gene encoding a bioactive metabolic molecule. In addition, cDNA, synthetically produced DNA or chromosomal DNA may be employed utilizing methods and protocols known and practiced by those having skill in the art.

[0320] According to one approach for gene therapy, a vector encoding an IR or IGF-1R agonist or antagonist peptide is directly injected into the recipient cells (in vivo gene therapy). Alternatively, cells from the intended recipients are explanted, genetically modified to encode an IR or IGF-1R agonist or antagonist peptide, and reimplanted into the donor (ex vivo gene therapy). An ex vivo approach provides the advantage of efficient viral gene transfer, which is superior to in vivo gene transfer approaches. In accordance with ex vivo gene therapy, the host cells are first transfected with engineered vectors containing at least one gene encoding an IR or IGF-1R agonist or antagonist peptide, suspended in a physiologically acceptable carrier or excipient such as saline or phosphate buffered saline, and the like, and then administered to the host or host cells. The desired gene product is expressed by the injected cells, which thus introduce the gene product into the host. The introduced gene products can thereby be utilized to treat or ameliorate a disorder that is related to altered insulin or IGF-1 levels (e.g., diabetes).

[0321] The described constructs may be administered in the form of a pharmaceutical preparation or composition containing a pharmaceutically acceptable carrier and a physiological excipient, in which preparation the vector may be a viral vector construct, or the like, to target the cells, tissues, or organs of the recipient organism of interest, including human and non-human mammals. The composition may be formed by dispersing the components in a suitable pharmaceutically acceptable liquid or solution such as sterile physiological saline or other injectable aqueous liquids. The amounts of the components to be used in such compositions may be routinely determined by those having skill in the art. The compositions may be administered by parenteral routes of injection, including subcutaneous, intravenous, intramuscular, and intrasternal.

[0322] J. Cancer Therapeutics

[0323] In recent experiments, embryo fibroblasts from IGF-1R knock-out mice have been shown to be highly resistant to transformation by oncogenes such as SV40 T antigen, activated Ha-ras, activated Src, and others (B. Valentinis and R. Baserga, 2001, Mol. Pathol., 54:133-137). This suggested that IGF-1R was required to mediate malignant transformation by these oncogenes. In addition, IGF-1 and IGF-1R have been shown to act as transforming factors in various forms of human cancer (see above). IGF-1 and IGF-2 have also been implicated as factors in the malignant transformation of several tissues. Transgenic mice that express a truncated form of IGF-1 that has a decreased affinity for IGFBPs (des(1-3) IGF-11), show increased incidence of mammary tumors (Hadsell et al., 2000, Oncogene 19:889-898). In addition, mice over-expressing IGF-1I in mammary glands showed increased mammary tumor formation (Bates et al., 1995, Br. J. Cancer 72:1189-1193). Transgenic mice that overexpress IGF-1 in the basal layer of the skin show hyperplasia of the epidermis and increased promotion of spontaneous tumors (DiGiovanni et al., 2000, Cancer Res. 60:1561-1570).

[0324] IGF-1R also appears to cross-talk with other hormone receptors. Considerable evidence suggests that estrogen can act to increase expression of IGF-1R. This is of particular importance in breast cancer, where the expression of IGF-1R correlates with expression of the estrogen receptor (ER). IGF-1R expression is higher in tumors from ER positive patients. Accordingly, IGF-1R expression could be used as a prognostic marker for breast cancer patients. In addition, high levels of IRS-1, a key intermediate in the IGF-1R signal transduction cascade, correlates with tumor size and shorter disease-free survival in patients with ER positive tumors (D. Sachdev and D. Yee, 2001, Endocr. Relat. Cancer 8:197-209). In addition, treatment with anti-estrogens has been shown to decrease the expression of IGF-1R and IRS-1 (Chan et al., 2001, Clin. Cancer Res. 7:2545-2554). Thus, the cross-talk between IGF-1R and ER may be complex. Yet, it is clear that IGF-signaling promotes malignant transformation in mammary glands. Interestingly, ER positive MCF-7 cells treated with IGF-1 show a sustained activation of the PI3K-Akt pathway and protection against apoptosis induced by serum deprivation. In contrast, ER negative MDA-MB 231 cells show only a transient activation of PI3K-Akt pathway (Bartucci et al., 2001, Cancer Res. 61:6747-6754).

[0325] Studies have also revealed a connection between IGF-1R-mediated signaling and epidermal growth factor (EGF)-induced signaling through ErbB-receptors. IGF-1R and ErbB-2 (Neu/Her2) have been observed to form hetero-oligomers induced by stimulation with heregulin or IGF-1 (Balana et al., 2001, Oncogene, 19:34-47, 2001). In glioblastomas, resistance to a chemical inhibitor of the ErbB receptor tyrosine kinase has been correlated with increased IGF-1R expression and constitutive PI3K signaling (Chakravarti et al., 2002, Cancer Res. 62:200-207). In breast cancer cell lines over expressing ErbB-2, increased IGF-1R signaling was observed in the presence of the anti-ErbB-2 receptor monoclonal antibody Herceptin®/trastuzumab (Lu et al., 2001, J. Natl. Cancer Inst. 93:1852-1857).

[0326] Modulation of IGF-signaling in various malignant cells has provided further evidence for the involvement of the IGF-1R in cancer. Abrogation of IGF-1R expression by antisense RNA reversed the transformed phenotype in cervical cancer cells. Antisense to IGF-1R also inhibited glioblastoma and melanoma xenografts in nude mice (Resnicoff et al., 1994, Cancer Res. 54:4848-4850; Resnicoff et al., 1994, Cancer Res. 54:2218-2222; Nakamura et al., 2000, Cancer Res. 60:760-765, 2000). Experiments have also indicated that IGF-1R is involved in the development and maintenance of metastatic phenotypes. In particular, high expression of a dominant negative mutant of IGF-1R (486stop) in ER positive breast cancer cells has been shown to inhibit adhesion, invasion, and metastasis of the cells (Dunn et al., 1998, Cancer Res. 58:3353-3361). Moreover, lung carcinoma cells exhibited an enhanced metastatic phenotype following overexpression of IGF-1R (Long et al., 1998, Exp. Cell Res. 238:116-121). In addition, activation of IGF-1R has been shown to block apoptotic pathways. Apoptosis in mammary glands was inhibited in IGF-1 transgenic mice (Hadsell et al., 2000, Oncogene 19:889-898). Moreover, down-regulation of IGF-1R function, either by antisense strategies or dominant negative mutants, caused massive apoptosis of tumor cells in vitro and in vivo. IGF-1 has also been shown to inhibit apoptosis associated with transformation by the c-myc oncogene and apoptosis induced by chemotherapeutic agents. The anti-apoptotic signaling of IGF-1 has been attributed to the PI3K-Akt pathway, although other pathways may mediate similar effects (Butt et al., 1999, Immunol. Cell Biol. 77:256-262; B. Valentinis and R. Baserga, 2001, Mol. Pathol. 54:133-137).

[0327] The sum of these observations indicate the importance of identifying antagonists or inhibitors of IGF-1 and/or IGF-1R. Attempts have been made to develop clinically relevant inhibitors of IGF-1R using monoclonal antibodies, antisense strategies, and peptide fragments derived from the natural ligand (Dunn et al., 1998, Cancer Res. 58:3353-3361; Z. Pietrzkowski et al., 1992, Cancer Res. 52:6447-6451; Z. Pietrzkowski et al., 1993, Cancer Res. 53:1102-1106; Rubini et al., 1999, Exp. Cell Res. 251:22-32). Using an alternate approach, this invention provides methods, kits, and compositions (e.g., pharmaceutical compositions) comprising IGF-1R antagonist peptides, or small molecule mimetics thereof, that can be useful in the diagnosis, treatment, and monitoring of one or more cancers. In some cases, the compositions, methods, and kits of the invention can also be used to determine the prognosis of a IGF-related medical condition (e.g., cancer). Advantageously, certain IGF-1R antagonist peptides disclosed herein are specific for Site 1 or Site 2 of the IGF-1 receptor.

[0328] In accordance with the invention, non-limiting cancer types include carcinoma, sarcoma, myeloma, leukemia, and lymphoma, and mixed types of cancers, such as adenosquamous carcinoma, mixed mesodermal tumor, carcinosarcoma, and teratocarcinoma. Representative cancers include, but are not limited to, bladder cancer, lung cancer, breast cancer, colon cancer, rectal cancer, endometrial cancer, ovarian cancer, head and neck cancer, prostate cancer, and melanoma. Specifically included are AIDS-related cancers (e.g., Kaposi's Sarcoma, AIDS-related lymphoma), bone cancers (e.g., osteosarcoma, malignant fibrous histiocytoma of bone, Ewing's Sarcoma, and related cancers), and hematologic/blood cancers (e.g., adult acute lymphoblastic leukemia, childhood acute lymphoblastic leukemia, adult acute myeloid leukemia, childhood acute myeloid leukemia, chronic lymphocytic leukemia, chronic myelogenous leukemia, hairy cell leukemia, cutaneous T-cell lymphoma, adult Hodgkin's disease, childhood Hodgkin's disease, Hodgkin's disease during pregnancy, mycosis fungoides, adult non-Hodgkin's lymphoma, childhood non-Hodgkin's lymphoma, non-Hodgkin's lymphoma during pregnancy, primary central nervous system lymphoma, Sezary syndrome, cutaneous T-cell lymphoma, Waldenström's macroglobulinemia, multiple myeloma/plasma cell neoplasm, myelodysplastic syndrome, and myeloproliferative disorders).

[0329] Also included are brain cancers (e.g., adult brain tumor, childhood brain stem glioma, childhood cerebellar astrocytoma, childhood cerebral astrocytoma, childhood ependymoma, childhood medulloblastoma, supratentorial primitive neuroectodermal and pineal, and childhood visual pathway and hypothalamic glioma), digestive/gastrointestinal cancers (e.g., anal cancer, extrahepatic bile duct cancer, gastrointestinal carcinoid tumor, colon cancer, esophageal cancer, gallbladder cancer, adult primary liver cancer, childhood liver cancer, pancreatic cancer, rectal cancer, small intestine cancer, and gastric cancer), musculoskeletal cancers (e.g., childhood rhabdomyosarcoma, adult soft tissue sarcoma, childhood soft tissue sarcoma, and uterine sarcoma), and endocrine cancers (e.g., adrenocortical carcinoma, gastrointestinal carcinoid tumor, islet cell carcinoma (endocrine pancreas), parathyroid cancer, pheochromocytoma, pituitary tumor, and thyroid cancer).

[0330] Further included are neurologic cancers (e.g., neuroblastoma, pituitary tumor, and primary central nervous system lymphoma), eye cancers (e.g., intraocular melanoma and retinoblastoma), genitourinary cancers (e.g., bladder cancer, kidney (renal cell) cancer, penile cancer, transitional cell renal pelvis and ureter cancer, testicular cancer, urethral cancer, Wilms' tumor and other childhood kidney tumors), respiratory/thoracic cancers (e.g., non-small cell lung cancer, small cell lung cancer, malignant mesothelioma, and malignant thymoma), germ cell cancers (e.g., childhood extracranial germ cell tumor and extragonadal germ cell tumor), skin cancers (e.g., melanoma, and merkel cell carcinoma), gynecologic cancers (e.g., cervical cancer, endometrial cancer, gestational trophoblastic tumor, ovarian epithelial cancer, ovarian germ cell tumor, ovarian low malignant potential tumor, uterine sarcoma, vaginal cancer, and vulvar cancer), and unknown primary cancers.

[0331] Specific breast cancers include, but are not limited to, non-invasive cancers, such as ductal carcinoma in situ (DCIS), intraductal carcinoma lobular carcinoma in situ (LCIS), papillary carcinoma, and comedocarcinoma, or invasive cancers, such as adenocarcinomas, or carcinomas, e.g., infiltrating ductal carcinoma, infiltrating lobular carcinoma, infiltrating ductal and lobular carcinoma, medullary carcinoma, mucinous (colloid) carcinoma, comedocarcinoma, Paget's Disease, papillary carcinoma, tubular carcinoma, and inflammatory carcinoma. Specific prostate cancers may include adenocarcinomas and sarcomas, or pre-cancerous conditions, such as prostate intraepithelial neoplasia (PIN). Specific lung cancers include those relating to tumors such as bronchial carcinoid (bronchial adenoma), chondromatous hamartoma (benign), solitary lymphoma, and sarcoma (malignant) tumors, as well as lung cancers relating to multifocal lymphomas. Bronchogenic carcinomas may present as squamous cell carcinomas, small cell carcinomas, non-small cell carcinomas, or adenocarcinomas.

[0332] The IGF-1R antagonist peptides of the invention may be administered individually, or in combination with other IGF-1 or IGF-1R antagonists or inhibitors. Alternatively, the disclosed IGF-1R antagonist peptides can be used in combination with other cancer therapies, e.g., surgery, radiation, biological response modification, immunotherapy, hormone therapy, and/or chemotherapy. For prostate cancers, non-limiting examples of chemotherapeutic agents include docetaxel, paclitaxel, estramustine, etoposide, vinblastine, mitoxantrone, and paclitaxel. For breast cancers, non-limiting examples of chemotherapeutic and biological agents include cyclophosphamide, methotrexate, 5-fluorouracil, doxorubicin, tamoxifen, paclitaxel, docetaxel, navelbine, capecitabine, mitomycin C, Interferons, interleukin-2, lymphocyte-activated killer cells, tumor necrosis factors, and monoclonal antibodies (e.g., mAb to HER-2/neu receptor (trastuzumab) Herceptin®). For lung cancers, non-limiting examples of chemotherapeutic and biological agents include, but are not limited to, platinum compounds (e.g., cisplatin or carboplatin), vinca alkaloids (e.g., vinorelbine, vincristine, or vinblastine), taxines (e.g., docetaxel or paclitaxel), and various topoisomerase inhibitors.

### EXAMPLES

[0333] The examples as set forth herein are meant to exemplify the various aspects of the present invention and are not intended to limit the invention in any way.

[0334] The following materials were used in the examples described below. Soluble IGF-1R was obtained from R&D Systems (Minneapolis, Minn.; Cat. # 391-GR/CF). Insulin receptor was prepared according to Bass et al., 1996. The insulin was either from Sigma (St. Louis, Mo.; Cat. # I-0259) or Boehringer. The IGF-1 was from PeproTech (Cat. # 100-11). All synthetic peptides were synthesized by Novo Nordisk, AnaSpec, Inc. (San Jose, Calif.), PeptioGenics (Livermore, Calif.), or Research Genetics (Huntsville, Ala.) at >80% purity. The Maxisorb Plates were from NUNC via Fisher (Cat. # 12565347). The HRP/Anti-M13 conjugate was from Pharmacia (Cat. # 27-9421-01). The ABTS solution was from BioF/X (Cat. # ABTS-0100-04).

### Example 1

### Monomer and Dimer Peptides

[0335] A. Cloning

[0336] Monomer and dimer peptides were constructed and expressed as protein fusions to a chitin binding domain (CBD) using the pTYB2 vector from the IMPACT™-CN system (New England Biolabs (NEB), Beverly, Mass.). The pTYB2 vector encodes a protein-splicing element (termed intein), which initiates self-cleavage upon the addition of DTT. The intein self-cleavage separates the dimer from the affinity tag, to allow purification.

[0337] In the pTYB2 construct, the C-terminus of the peptide sequence was fused to the N-terminus of the intein/CBD sequence. Two peptide-flanking epitope tags were included: a shortened-FLAG® at the N-terminus and E-Tag at the C-terminus. This fusion was generated by ligating a vector fragment encoding the intein/CBD with a PCR product encoding the peptide of interest.

[0338] The vector fragment was obtained by digesting at appropriate restriction sites the pTBY2 vector. The digested DNA fragment was resolved on a 1% agarose gel, excised, and purified by QIAEXII (QIAGEN, Valencia, Calif.). To obtain the PCR product of the target proteins, primers were synthesized which anneal to appropriate sequences. The vector and insert were ligated overnight at 15° C. The ligation product was purified using QIAquick spin columns (QIAGEN) and electroporations were performed at 1500 V in an electroporation cuvette (0.1 mm gap; 0.5 ml volume) containing 10 ng of DNA and 40 μl of E. coli strain BL21.

[0339] Immediately following electroporation, 1 ml of pre-warmed (40° C.) 2×YT medium containing 2% glucose (2×YT-G) was added to the transformants. The transformants were grown at 37° C. for 1 h, and then plated onto 2×YT-AG plates and incubated overnight at 37° C. Individual colonies were isolated and used to innoculate 2×YT-G. The cultures were grown overnight at 37° C. Plasmid DNA was isolated from the cultures and sequencing was performed to confirm that the correct construct was obtained.

[0340] B. Small-Scale Expression of Peptide-CBD Fusion Proteins

[0341] E. coli ER2566 (New England Biolabs) containing plasmids encoding peptide-CBD fusion proteins were grown in 2×YT-AG at 37° C. overnight, with agitation (250 rpm). The following day, the cultures were used to inoculate media (2×YT-G) to obtain an OD₆₀₀ of 0.1. Upon reaching an OD₆₀₀ of 0.6, expression of the fusion protein was induced by the addition of IPTG (isopropyl-β-D-thiogalactopyranoside) to a final concentration of 0.3 mM. Cells were grown for 3 h. Following this, cells were pelleted by centrifugation and the cell pellets were analyzed by SDS-PAGE electrophoresis. Production of the correct molecular weight fusion proteins was confirmed by Western blot analysis using the monoclonal antibody anti-E-Tag-HRP conjugate (Amersham Pharmacia).

[0342] C. Large-Scale Expression and Purification of Soluble Peptide-CBD Fusion Proteins

[0343] E. coli ER2566 carrying plasmids encoding the fusion proteins were grown in 2×YT-AG media at 37° C. for 8 h, with agitation (250 rpm). The cultures were back-diluted into to 2 L volumes of 2×YT-A to achieve an OD₆₀₀ of 0.1. Upon reaching an OD₆₀₀ of 0.5, IPTG was added to a final concentration of 0.3 mM. Cells were grown at 30° C. overnight. The next day cells were isolated by centrifugation. Samples of the cell pellet were analyzed by SDS-PAGE followed by the Western blot analysis using the mouse monoclonal antibody anti-E-Tag-HRP conjugate (Pharmacia) to visualize the expressed product.

[0344] D. Purification

[0345] The cell pellets were disrupted mechanically by sonication or chemically by treatment with the mild detergent. After removal of cell debris by centrifugation, the soluble proteins in the clarified lysate were prepared for chromatographic purification by dilution or dialysis into the appropriate starting buffer. The CBD fusions were purified by chitin affinity chromatography according to the manufacturer's instructions (New England Biolabs). The lysate was loaded onto a chitin affinity column and the column was washed with 10 volumes of column buffer. Three bed volumes of the DTT containing cleavage buffer were loaded onto the column and the column was incubated overnight. The next day, the target protein was eluted by continuing the flow of the cleavage buffer without DTT. The purified proteins were analyzed for purity and integrity by SDS-PAGE and Western blot analysis according to standard protocols.

### Example 2

### PEG-Based Dimer Peptides

[0346] A. Synthesis of the Aldehyde Containing Peptide

[0347] The peptide was synthesized by stepwise solid phase synthesis on Rink amide Tentagel (0.21 mmol/g). Three equivalents of Fmoc-amino acids were used. The serine residue was introduced into the peptide by either coupling Fmoc-Ser(tBu)-OH to the N-terminal peptide or coupling Boc-Ser(tBu) to a selectively protected lysine side-chain. The peptide was then deprotected and cleaved from the resin by treatment with 95% TFA (trifluoroacetic acid; aq) containing TIS (triisopropylsilan). Periodate oxidation, using 2 equivalent of NaIO₄ in 20% DMSO (dimethyl sulfoxide)-80% phosphate buffer pH 7.5 (45 μl/μmol peptide) for 5 min at room temperature (RT), converted the 2-amino alcohol moiety in an α-oxoacyl group. The peptide was purified immediately following oxidation.

[0348] B. Synthesis of the PEG-Based Dimer

[0349] The unprotected and oxidized peptide (4.2 equivalent) was dimerized on the dioxyamino-PEG (polyethylene glycol)-linker (1 equivalent) in 90% DMSO-10% 20 mM NaOAc buffer, pH 5.1 (4.2 μl/μmol peptide). The solution was left for 1 h at 38° C. and the progress of the reaction was monitored by MALDI-MS (matrix-assisted laser desorption/ionization mass spectrometry). Following this, the crude dimer was purified by semi-preparative HPLC (high performance liquid chromatography).

[0350] The molecular weights and inter peptide distance of various linkers is shown in Table 3, below.

TABLE 3

| Structure | Number | MW | MW (—2H₂O) |
|---|---|---|---|
| [chemical structure] | 1 | 100.1 | 64.1 |
| [chemical structure] | 2 | 58.04 | 22.04 |
| [chemical structure] | 3 | 149.15 | 113.15 |
| [chemical structure] | 4 | 150.14 | 114.14 |
| [chemical structure] | 5 | 134.13 | 98.13 |
| [chemical structure] | 6 | 134.13 | 98.13 |
| [chemical structure] | 7 | 134.13 | 98.13 |
| [chemical structure] | 8 | 234.25 | 198.25 |
| [chemical structure] | 9 | 302.3 | 266.3 |
| [chemical structure] | 10 | 72.06 | 36.06 |
| [chemical structure] | 11 | 86.09 | 50.09 |
| [chemical structure] | 12 | 114.14 | 78.14 |
| [chemical structure] | 13 | 128.08 | 92.08 |
| [chemical structure] | 14 | 142.19 | 106.19 |
| (HCO)₄-(Lys)₂-Lys-Gly-NH₂ | 15 | | |
| [chemical structure] | 16 | 136.2 | 100.2 |
| [chemical structure] | 17 | 180.2 | 144.2 |
| [chemical structure] | 18 | 224.3 | 188.3 |
| [chemical structure] | 19 | 268.3 | 232.3 |
| [chemical structure] | 20 | 312.4 | 276.4 |
| [chemical structure] | 21 | 278.4 | 242.4 |
| [chemical structure] | 22 | 240.3 | 204.3 |
| [chemical structure] | 23 | 240.3 | 204.3 |
| [chemical structure] | 24 | 210.2 | 192.2 |

### Example 3

### Determination of Insulin Receptor Binding

[0351] IR was incubated with ¹²⁵I-labeled insulin at various concentrations of test substance and the K_{d} was calculated. According to this method, human insulin receptor (HIR) or human IGF-1 receptor (HIGF-1R) was purified from transfected cells after solubilization with Triton X-100. The assay buffer contained 100 mM HEPES (pH 7.8), 100 mM NaCl, 10 mM MgCl₂, 0.5% human serum albumin (HSA), 0.2% gammaglobulin and 0.025% Triton X-100. The receptor concentration was chosen to give 30-60% binding of 2000 cpm (3 pM) of its ¹²⁵I-labeled ligand (TyrA14⁻¹²⁵I-HI or Tyr31-¹²⁵I-IGF1) and a dilution series of the substance to be tested was added. After equilibration for 2 days at 4° C., each sample (200 μl) was precipitated by addition of 400 μl 25% PEG 6000, centrifuged, washed with 1 ml 15% PEG 6000, and counted in a gamma-counter.

[0352] The insulin/IGF-1 competition curve was fitted to a one-site binding model and the calculated parameters for receptor concentration, insulin affinity, and non-specific binding were used in calculating the binding constants of the test substances. Representative curves for insulin competition are shown in FIGS. 10A-10C; 11A-11D. Qualitative data are provided in Table 4, below.

[0353] Table 4 illustrates IR affinities for the RP9 monomer peptide and various RP9 monomer truncations. The results demonstrate that RP9 N-terminal sequence (GSLD; SEQ ID NO:1785) and C-terminal sequence (LGKK; SEQ ID NO:1786) can be deleted without substantially affecting HIR binding affinity (Table 4).

TABLE 4

| Pep- | SEQ ID | | Site | | HIR Kd |
|---|---|---|---|---|---|
| tide | NO: | Formula | IR | Sequence | (mol/l) |
| S386 | 1559 | 1 | 1 | GSLDESFYDWFERQLG | 3.2*10⁻⁷ |
| S395 | 1787 | 1 | 1 | GSLDESFYDWFERQL | 9.1*10⁻⁸ |
| S394 | 1788 | 1 | 1 | GSLDESFYDWFERQ | 8.1*10⁻⁸ |
| S396 | 1789 | 1 | 1 | GSLDESFYDWFER | >2*10⁻⁵ |
| S399 | 1790 | 1 | 1 | ESFYDWFERQL | 9.1*10⁻⁸ |
| S400 | 1791 | 1 | 1 | ESFYDWFERQ | 6.3*10⁻⁷ |

[0354] FIGS. 10A-10C demonstrate that Site 1-Site 2 heterodimer peptides 537, 538, and 539 bound to IR with substantially higher (several orders of magnitude) affinity than corresponding monomer (D117 and 540) and homodimer (521 and 535) peptides. FIGS. 11A-11D demonstrate that Site 1-Site 2 heterodimer peptides, 537 and 538, bound to IR with markedly higher affinity than the monomer peptide D117.

### Example 4

### Adipocyte Assay for Determination of Insulin Agonist Activity

[0355] Insulin increases uptake of ³H glucose into adipocytes and its conversion into lipid. Incorporation of ³H into the lipid phase was determined by partitioning of lipid phase into a scintillant mixture, which excludes water-soluble ³H products. The effect of compounds on the incorporation of ³H glucose at a sub-maximal insulin dose was determined, and the results expressed as increase relative to full insulin response. The method was adapted from Moody et al., 1974, Horm. Metab. Res. 6(1):12-6.

[0356] Mouse epididymal fat pads were dissected out, minced into digestion buffer (Krebs-Ringer 25 mM HEPES, 4% HSA, 1.1 mM glucose, 0.4 mg/ml Collagenase Type 1, pH 7.4), and digested for up to 1.5 h at 36.5° C. After filtration, washing (Krebs-Ringer HEPES, 1% HSA), and resuspension in assay buffer (Krebs-Ringer HEPES, 1% HSA), free fat cells were pipetted into 96-well Picoplates (Packard), containing test solution and approximately an ED₂₀ insulin.

[0357] The assay was started by addition of ³H glucose (Amersham TRK 239), in a final concentration of 0.45 mM glucose. The assay was incubated for 2 h, 36.5° C., in a Labshaker incubation tower, 400 rpm, then terminated by the addition of Permablend/Toluene scintillant (or equivalent), and the plates sealed, before standing for at least 1 h and detection in a Packard Top Counter or equivalent. A full insulin standard curve (8 dose) was run as control on each plate.

[0358] Data are presented graphically, as effect of compound on an (approximate) ED₂₀ insulin response, with data normalized to a full insulin response. The assay can also be run at basal or maximal insulin concentration. Representative dose-response curves for insulin and IGF-1 are shown in FIGS. 12-18. Qualitative data are shown in Tables 5-7.

[0359] In free fat cell (FFC) assays, truncated synthetic RP9 monomer peptides S390 and S394 showed potency similar to full-length RP9 monomer peptides (FIGS. 12A-12D). Truncated synthetic RP9 homodimer peptides S415 and S417 were highly potent in FFC assays, but less potent than full-length RP9 homodimer peptides (FIGS. 13A-13C; compare to peptides 521 and 535, described below). The potency of recombinant RP9 homodimer peptides 521 and 535 in FFC assays is shown in FIGS. 14A-14C. The curves are flattened, suggesting that the binding mechanism may not be mediated by simple intramolecular binding (FIGS. 14A-14C).

[0360] Results further indicated that synthetic RP9 homodimer peptides S337 and S374 showed increased HIR biding affinity and increased potency in FFC assays compared to synthetic RP9 monomer, S371 (Table 5). Similarly, synthetic RP9 homodimer peptides S314 and S317 showed increased HIR binding affinity and increased potency in FFC assays compared to synthetic RP9 monomer, S371, and various RP9 truncations (Table 6).

TABLE 5

| | SEQ | | | | | | |
|---|---|---|---|---|---|---|---|
| | ID | | Site | Monomer or | | HIR K_{d} | |
| Pep. | NO: | Formula | IR | Dimer | Sequence | (mol/l) | FFC |
| S371 | 1558 | 1 | 1 | M (RP9) | GSLDESFYDWFERQLGKK | 6.3.*10⁻⁷ | + |
| S337 | 1792 | 1—1 | 1—1 | D, C-Term 23 | (GSLDESFYDWFERQLGKK-Lig)₂-23 | 1.1*10⁻⁸ | +++++ |
| S374 | 1793 | 1—1 | 1—1 | D, N-Term 17 | 17-(GSLDESFYDWFERQLGKK)₂ | 1.8*10⁻⁷ | ++++ |

M = monomer; D = dimer; C-Term = C-terminal linker (C—C); N-Term = N-terminal linker (N—N); 23 and 17 represent specific chemical linkers (see Table 3); For FFC: 0 is no effect, + is agonist, − is antagonist.

[0361] TABLE 6

| | SEQ | | | | | | |
|---|---|---|---|---|---|---|---|
| | ID | | Site | | | HIR K_{d} | |
| Peptide | NO: | Form. | IR | Mon. or Dimer | Sequence | (mol/l) | FFC |
| S371 | 1558 | 1 | 1 | M | GSLDESFYDWFERQLGKK | 6.3. * 10⁻⁷ | + |
| (RP9) | | | | | | | |
| S395 | 1787 | 1 | 1 | M | GSLDESFYDWFERQL | 9.1 * 10⁻⁸ | + |
| S394 | 1788 | 1 | 1 | M | GSLDESFYDWFERQ | 8.1 * 10⁻⁸ | ++ |
| S396 | 1789 | 1 | 1 | M | GSLDESFYDWFER | >2 * 10⁻⁵ | 0 |
| S390 | 1794 | 1 | 1 | M | ESFYDWFERQLG | 6.2 * 10⁻⁷ | + |
| S399 | 1790 | 1 | 1 | M | ESFYDWFERQL | 9.1 * 10⁻⁸ | ++ |
| S400 | 1791 | 1 | 1 | M | ESFYDWFERQ | 6.3 * 10⁻⁷ | 0 |
| S415 | 1795 | 1—1 | 1—1 | D; C-Term | (ESFYDWFERQLGK)₂-23 | 1.0 * 10⁻⁷ | ++++ |
| S417 | 1796 | 1—1 | 1—1 | D; N-Term | 23-(ESFYDWFERQLG)₂ | 9.2 * 10⁻⁷ | +++ |

M = monomer; D = dimer; C-Term = C-terminal linker (C—C); N-Term = N-terminal tinker (N—N); 23 represents a specific chemical linker (see Table 3); For FFC: 0 is no effect, + is agonist, − is antagonist; Form. = formula; Mon. = monomer;

[0362] Site 1-Site 2 dimer peptides 537 and 538 were inactive in the FFC assays using the standard concentration of insulin (FIGS. 15A-15C). However, Site 1-Site 2 dimer peptides 537 and 538 were antagonists in the FFC assay in the presence of a stimulating concentration of insulin (FIGS. 16A-16C). In contrast, Site 2-Site 1 dimer peptide 539 was a full agonist in the FFC assay, with a slope similar to that of insulin (FIGS. 17A-17B).

[0363] Additional experiments confirmed that FFC assay activity of Site 1-Site 2 dimer peptides was affected by the orientation of the monomer subunits (FIGS. 18A-18D). In particular, dimer peptides comprising Site 1 (S372 or S373) and Site 2 (S451 or S452) monomer subunits exhibited antagonist activity in the Site 1-Site 2 orientation (C—N linkage) (dimer peptide S453); moderate levels of agonist activity in the Site 1-Site 2 orientation (N—N or C—C linkage) (dimer peptides S454 and S456); and high levels of agonist activity in the Site 2-Site 1 orientation (C—N linkage) (dimer peptide S455) (FIGS. 18A-18D).

[0364] Table 7, below, shows the HIR binding affinity and FFC assay potency of various synthetic peptides, including Site 1-Site 1 dimer peptides S325, S329, S332; S333, S334, S335, S336, S337, S349, S350, S351, S352, S353, S354, S361, S362, S363, S374, S375, S376, S378, S379, S380, S381, S414, S415, S416, S417, S418, S420, and S424. These synthetic dimer peptides exhibited properties comparable to dimer peptides 521 and 535, regardless of the orientation of the monomer subunits. In particular, synthetic Site 1-Site 2 dimer peptides S425, S453, and S459 exhibited antagonist properties comparable to those of the Site 1-Site 2 dimer peptides 537 and 538. Synthetic Site 1-Site 2 dimer peptides S455, S457, and S458 exhibited agonist properties comparable to the dimer peptide 539. Synthetic Site 1-Site 2 dimer peptides S436, S437, S438, S454, S456 act as partial agonists in the FFC assay (i.e., the peptides exhibit a maximal response of less than 100% that of insulin), which is shown in the table as “++” and “+++”.

[0365] Table 7 also shows properties of truncated monomer and dimer peptides, and thereby indicates which N- or C-terminal residues can be deleted without substantial loss of HIR binding affinity (e.g., see synthetic peptides S386 through S392, S394 through S403, and S436 through S445). Notably, certain Site 2-Site 1 dimers show IR affinities of 2*10⁻¹¹ (see, e.g., S519 and S520). These peptides are also very potent in the fat cell assay (FIGS. 31A-31B) and even more potent in the HIR kinase assay (FIGS. 32A-32B) (kinase assay described below).

TABLE 7

| Pep- | SEQ ID | | | Site | | HIR Kd | |
|---|---|---|---|---|---|---|---|
| tide | NO: | Formula | Linkage | IR | Sequence | (mol/l) | FFC |
| S105 | 1797 | F1 | — | 1 | FHENFYDWFVRQVAKK | 3.1*10⁻⁷ | ++ |
| S106 | 1798 | F1 | — | 1 | FHENFYDWFVRQASKK | 4.2*10⁻⁷ | ++ |
| S107 | 1799 | F1 | — | 1 | FHENFYDWFVRAVSKK | 10.0*10⁻⁷ | + |
| S108 | 1800 | F1 | — | 1 | FHENFYDWFVAQVSKK | 7.5*10⁻⁷ | + |
| S109 | 1801 | F1 | — | 1 | FHENFYDWFARQVSKK | 2.3*10⁻⁷ | ++ |
| S110 | 1802 | F1 | — | 1 | FHEAFYDWFVRQVSKK | 2.2*10⁻⁷ | ++ |
| S111 | 1803 | F1 | — | 1 | FHANFYDWFVRQVSKK | 3.3*10⁻⁷ | 0 |
| S112 | 1804 | F1 | — | 1 | FAENFYDWFVRQVSKK | 6.1*10⁻⁷ | + |
| S113 | 1805 | F1 | — | 1 | AHENFYDWFVRQVSKK | 5.9*10⁻⁷ | + |
| S114 | 1556 | F1 | — | | fhenfydwfvrqvskk | 8.3*10⁻⁶ | 0 |
| S115 | 1806 | F1 | — | 1 | EFHENFYDWFVRQVSEE | 6.5*10⁻⁷ | + |
| S116 | 1807 | F1 | — | 1 | FHENFYGWFVRQVSKK | 1.4*10⁻⁶ | ++ |
| S117 | 1808 | F2 | — | 1 | HETFYSMIRSLAK | 2.7*10⁻⁶ | 0 |
| S118 | 1809 | F2 | — | 1 | SDGFYNAIELLS | 2.4*10⁻⁶ | + |
| S119 | 1810 | F2 | — | 1 | SLNFYDALQLLAKK | 1.8*10⁻⁶ | 0 |
| S120 | 1811 | F2 | — | 1 | HDPFYSMMKSLLK | 2.0*10⁻⁶ | 0 |
| S121 | 1812 | F2 | — | 1 | NSFYEALRMLSSK | 3.1*10⁻⁶ | 0 |
| S122 | 1813 | F7 | — | | HPTSKEIYAKLLK | 9.3*10⁻⁶ | 0 |
| S123 | 1814 | F7 | — | | HPSTNQMLMKLFK | 1.6*10⁻⁵ | 0 |
| S124 | 1815 | F7 | — | | HPPLSELKLFLIKK | 2.3*10⁻⁵ | 0 |
| S127 | 1816 | F2 | — | 1 | WSDFYSYFQGLD | 1.2*10⁻⁶ | 0 |
| S128 | 1817 and | F1—F1 | C—C | 1—1 | (FHENFYDWFVRQVSKK)₂-Dap | 1.1*10⁻⁶ | ++ |
| | 1818 | | | | | | |
| S129 | 1819 | F2 | — | 1 | SSNFYQALMLLS | 2.9*10⁻⁶ | 0 |
| S131 | 1820 | F1 | — | 1 | FHENFYDWFVRQVSKK-Lig | 1.2*10⁻⁶ | + |
| S137 | 1821 | F1 | — | 1 | HENFYGWFVRQVSKK | 7.7*10⁻⁷ | 0 |
| S145 | 1822 and | F1—F1 | C—C | 1—1 | (FHENFYDWFVRQVSKK)₂-Lys | 1.5*10⁻⁶ | ++ |
| | 1823 | | | | | | |
| S158 | 1780 | F1 | — | 1 | FHENFYDWFVRQVSK | 8.1*10⁻⁷ | + |
| S165 | 1554 | F1 | — | 1 | FYDWF | >2*10⁻⁵ | 0 |
| S166 | 1824 | F1 | — | 1 | FYDWFKK | >2*10⁻⁵ | 0 |
| S167 | 1825 | F1 | — | 1 | AFYDWFAKK | >2*10⁻⁵ | − |
| S168 | 1826 | F1 | — | 1 | AAAAFYDWFAAAAAKK | 3.8*10⁻⁶ | 0 |
| S169 | 1827 and | F1—F1 | N—N | 1—1 | 12-(Lig-FHENFYDWFVRQVSKK)₂ | 5.8*10⁻⁷ | ++ |
| | 1828 | | | | | | |
| S170 | 1829 and | F1—F1 | N—N | 1—1 | (CGFHENFYDWFVRQVSKK)₂ (linked at cysteines) | 7.0*10⁻⁷ | +++ |
| | 1830 | | | | | | |
| S171 | 1831 | F1 | — | 1 | CGFHENFYDWFVRQVSKK | 2.9*10⁻⁶ | +++ |
| S172 | 1832 and | F1—F1 | N—N | 1—1 | 14-(Lig-FHENFYDWFVRQVSKK)₂ | 4.8*10⁻⁶ | +++ |
| | 1833 | | | | | | |
| S173 | 1834 | F3 | — | 1 | LDALDRLMRYFEERPSL | 1.2*10⁻⁶ | 0 |
| S174 | 1835 | F3 | — | 1 | PLAELWAYFEHSEQGRSSAH | 1.6*10⁻⁵ | 0 |
| S175 | 1560 | F1 | — | 1 | GRVDWLQRNANFYDWFVAELG | 2.3*10⁻⁷ | +++ |
| S176 | 1836 | F1 | — | 1 | NGVERAGTGDNFYDWFVAQLH | 4.7*10⁻⁷ | + |
| S177 | 1837 | F2 | — | 1 | EHWNTVDPFYFTLFEWLRESG | 2.7*10⁻⁶ | 0 |
| S178 | 1838 | F2 | — | 1 | EHWNTVDPFYQYFSELLRESG | 1.3*10⁻⁷ | ++ |
| S179 | 1839 | F1 | — | 1 | QSDSGTVHDRFYGWFRDTWAS | 5.4*10⁻⁷ | + |
| S180 | 1840 | F1 | — | 1 | AFYDWFAK | >2*10⁻⁵ | 0 |
| S181 | 1841 | F1 | — | 1 | AFYDWFA | >2*10⁻⁵ | 0 |
| S182 | 1842 | F1 | — | 1 | AFYDWF | >2*10⁻⁵ | 0 |
| S183 | 1843 | F1 | — | 1 | FYDWFA | >2*10⁻⁵ | 0 |
| S184 | 1844 | F1 | — | 1 | Ac-FYDWF | >2*10⁻⁵ | 0 |
| S214 | 1845 | F1 | — | 1 | AFYEWFAKK | >2*10⁻⁵ | 0 |
| S215 | 1846 | F1 | — | 1 | AFYGWFAKK | >2*10⁻⁵ | 0 |
| S216 | 1847 | F1 | — | 1 | AFYKWFAKK | >2*10⁻⁵ | 0 |
| S217 | 1848 and | F2—F2 | C—C | 1—1 | (SDGFYNAIELLS-Lig)₂-14 | 3.9*10⁻⁸ | ++ |
| | 1849 | | | | | | |
| S218 | 1850 and | F1—F1 | C—C | 1—1 | (AFYDWFAKK-Lig)₂-14 | 1.1*10⁻⁵ | 0 |
| | 1851 | | | | | | |
| S219 | 1852 | F1 | — | 1 | FHENAYDWFVRQVSKK | >2*10⁻⁵ | 0 |
| S220 | 1853 | F1 | — | 1 | FHENFADWFVRQVSKK | >2*10⁻⁵ | 0 |
| S221 | 1854 | F1 | — | 1 | FHENFYAWFVRQVSKK | 1.1*10⁻⁶ | + |
| S222 | 1855 | F1 | — | 1 | FHENFYDAFVRQVSKK | >2*10⁻⁵ | 0 |
| S223 | 1856 | F1 | — | 1 | FHENFYDWAVRQVSKK | >2*10⁻⁵ | 0 |
| S226 | 1857 | F6 | — | 2 | QLEEEWAGVQCEVYGRECPS | 1.6*10⁻⁶ | |
| S227 | 1858 | F1 | — | 1 | CGGFHENFYDWFVRQVSKK | 5.1*10⁻⁷ | ++ |
| S228 | 1859 and | F1—F1 | N—N | 1—1 | (CGGFHENFYDWFVRQVSKK)₂ (linked at cysteines) | 3.6*10⁻⁷ | ++ |
| | 1860 | | | | | | |
| S229 | 1861 and | F2-F4 | C—C | 1-2 | SDGFYNAIELLS-Lig | 4.4*10⁻⁹ | 0 |
| | 1862 | | | | 12 | | |
| | | | | | KHLCVLEELFWGASLFGYCSGKK-Lig | | |
| S231 | 1863 and | F1—F1 | C—C | 1—1 | (FHENFYDWFVRQVSKKGGG-Lig)₂-14 | 2.7*10⁻⁷ | + |
| | 1864 | | | | | | |
| S232 | 1865 and | F1—F1 | N—N | 1—1 | 14-(Lig-GGGFHENFYDWFVRQVSKK)₂ | 3.8*10⁻⁷ | +++ |
| | 1866 | | | | | | |
| S233 | 1867 and | F1-F2 | C—C | 1—1 | FHENFYDWFVRQVSKK-Lig | 2.6*10⁻⁷ | + |
| | 1868 | | | | 14 | | |
| | | | | | SDGFYNAIELLS-Lig | | |
| S234 | 1869 | F1 | — | 1 | RVDWLQRNANFYDWFVAELG | 1.3*10⁻⁷ | ++ |
| S235 | 1870 | F1 | — | 1 | VDWLQRNANFYDWFVAELG | 5.3*10⁻⁸ | ++ |
| S236 | 1871 | F1 | — | 1 | DWLQRNANFYDWFVAELG | 1.0*10⁻⁷ | ++ |
| S237 | 1872 | F1 | — | 1 | WLQRNANFYDWFVAELG | 8.5*10⁻⁷ | 0 |
| S238 | 1873 | F1 | — | 1 | LQRNANFYDWFVAELG | 8.5*10⁻⁷ | 0 |
| S239 | 1874 | F1 | — | 1 | QRNANFYDWFVAELG | 1.3*10⁻⁶ | 0 |
| S240 | 1875 | F1 | — | 1 | RNANFYDWFVAELG | 1.4*10⁻⁶ | |
| S241 | 1876 | F1 | — | 1 | NANFYDWFVAELG | 1.6*10⁻⁶ | |
| S242 | 1877 | F1 | — | 1 | ANFYDWFVAELG | 2.0*10⁻⁶ | |
| S243 | 1878 | F1 | — | 1 | NFYDWFVAELG | 2.0*10⁻⁶ | |
| S244 | 1879 | F1 | — | 1 | GRVDWLQRNANFYDWFVAELG-Lig | 2.2*10⁻⁷ | ++ |
| S245 | 1880 | F1 | — | 1 | Lig-GRVDWLQRNANFYDWFVAELG | 2.2*10⁻⁷ | + |
| S246 | 1881 and | F8-F1 | C—C | 3-1 | ACAWPTYWNCGGGG-Lig | 5.0*10⁻⁶ | |
| | 1882 | 14 | | | | | |
| | | | | | FHENFYDWFVRQVSKK-Lig | | |
| S248 | 1883 | F1 | — | 1 | GRVDWLQRNANFYDWFVAEL | 6.3*10⁻⁸ | ++ |
| S249 | 1884 | F1 | — | 1 | GRVDWLQRNANFYDWFVAE | 7.4*10⁻⁷ | 0 |
| S250 | 1885 | F1 | — | 1 | GRVDWLQRNANFYDWFVA | 8.9*10⁻⁶ | 0 |
| S251 | 1886 | F1 | — | 1 | GRVDWLQRNANFYDWFV | 5.6*10⁻⁶ | |
| S252 | 1887 and | F2—F2 | C—C | 1—1 | (SDGFYNAIELLS-Lig)₂-14 | 4.4*10⁻⁷ | 0 |
| | 1888 | | | | | | |
| S253 | 1889 and | F1—F1 | C—C | 1—1 | (GRVDWLQRNANFYDWFVAELG-Lig)₂-14 | 2.2*10⁻⁸ | ++ |
| | 1890 | | | | | | |
| S255 | 1891 and | F2—F2 | C—C | 1—1 | (SDGFYNAIELLSGGG-Lig)₂-14 | 1.6*10⁻⁶ | 0 |
| | 1892 | | | | | | |
| S256 | 1893 | F6 | — | 2 | Acy-CLEEwGASL-Tic-QCSG | 9.0*10⁻⁶ | − |
| S257 | 1894 | F2 | — | 1 | RWPNFYGYFESLLTHFS | 1.4*10⁻⁶ | 0 |
| S259 | 1895 | F2 | — | 1 | EGWDFYSYFSGLLASVT | 7.7*10⁻⁶ | 0 |
| S260 | 1896 | F2 | — | 1 | LDRQFYRYFQDLLVGFM | 2.3*10⁻⁶ | 0 |
| S261 | 1897 | F2 | — | 1 | WGRSFYRYFETLLAQGI | >2*10⁻⁵ | 0 |
| S262 | 1898 | F4 | — | 1 | PLCFLQELFGGASLGGYCSG | 1.9*10⁻⁵ | 0 |
| S263 | 1899 | F6 | — | 2 | WLEQERAWIWCEIQGSGCRA | >2*10⁻⁵ | 0 |
| S264 | 1900 | F1 | — | 1 | IQGWEPFYGWFDDVVAQMFEE | 1.9*10⁻⁷ | 0 |
| S265 | 1901 | F1 | — | 1 | TGHRLGLDEQFYWWFRDALSG | 1.1*10⁻⁷ | 0 |
| S266 | 1902 | F6 | — | 2 | Abu-CLEEwGASL-Tic-QCSG | >2*10⁻⁵ | 0 |
| S268 | 1903 | F1 | — | 1 | RD-Hyp-FYDWFDDi | 4.5*10⁻⁷ | 0 |
| S273 | 1904 | F1-F2 | C-N | 1—1 | FHENFYDWFVRQVSKK-Lig-14-Lig-SDGFYNAIELLS | 1.5*10⁻⁶ | + |
| S278 | 1905 | F1- | — | 1 | GFREGQRWYWFVAQVT | >2*10⁻⁵ | 0 |
| | | derived | | | | | |
| S281 | 1906 | F5 | — | | DLRVLCELFGGAYVLGYCSE | 1.1*10⁻⁵ | 0 |
| S282 | 1907 | F4- | — | | HLSVGEELSWWVALLGQWAR | >2*10⁻⁵ | 0 |
| | | derived | | | | | |
| S283 | 1908 | F4- | — | | APVSTEELRWGALLFGQWAG | >2*10⁻⁵ | 0 |
| | | derived | | | | | |
| S284 | 1909 | F6- | — | | ALEEEWAWVQVRSIRSGLPL | >2*10⁻⁵ | 0 |
| | | derived | | | | | |
| S285 | 1910 | F6- | — | | WLEHEWAQIQCELYGRGCTY | 8.3*10⁻⁷ | |
| | | derived | | | | | |
| S287 | 1911 | F1 | — | 1 | QAPSNFYDWFVREWDEE | 5.9*10⁻⁶ | 0 |
| S288 | 1912 | F2 | — | 1 | QSFYDYIEELLGGEWKK | 4.3*10⁻⁶ | 0 |
| S289 | 1913 | F2 | — | 1 | DPFYQGLWEWLRESGEE | >2*10⁻⁵ | 0 |
| S290 | 1914 and | F1—F1 | N—N | 1—1 | 7-(Lig-GGGFHENFYDWFVRQVSKK)₂ | 9.0*10⁻⁷ | ++ |
| | 1915 | | | | | | |
| S291 | 1916 and | F1—F1 | N—N | 1—1 | 9-(Lig-GGGFHENFYDWFVRQVSKK)₂ | 1.2*10⁻⁶ | ++++ |
| | 1917 | | | | | | |
| S292 | 1918 and | F1—F1 | N—N | 1—1 | 12-(Lig-GGGFHENFYDWFVRQVSKK)₂ | 7.5*10⁻⁷ | ++ |
| | 1919 | | | | | | |
| S293 | 1920 and | F1—F1 | N—N | 1—1 | 13-(Lig-GGGFHENFYDWFVRQVSKK)₂ | 1.2*10⁻⁷ | ++ |
| | 1921 | | | | | | |
| S294 | 1922 | F1 | — | 1 | DWLQRNANFYDWFVAEL-Lig | 1.3*10⁻⁷ | ++ |
| S295 | 1923 | F1 | — | 1 | Lig-DWLQRNANFYDWFVAEL | 4.8*10⁻⁷ | + |
| S300 | 1924 and | F1—F1 | C—C | 1—1 | (DWLQRNANFYDWFVAEL-Lig′)₂-14 | 5.0*10⁻⁸ | +++ |
| | 1925 | | | | | | |
| S301 | 1926 and | F1—F1 | N—N | 1—1 | 14-(Lig′-DWLQRNANFYDWFVAEL)₂ | 6.4*10⁻⁷ | + |
| | 1927 | | | | | | |
| S302 | 1928 | F2 | — | 1 | SDGFYNA-Acy-ELLSG | 8.6*10⁻⁷ | 0 |
| S303 | 1929 | F2 | — | 1 | SGPFYEE-Acy-ELLW-Aib-G | 5.7*10⁻⁶ | 0 |
| S304 | 1930 | F2 | — | 1 | GGSFYDD-Acy-E-Aib-LW-Aib-G | 2.1*10⁻⁵ | 0 |
| S305 | 1931 | F2 | — | 1 | N-Aib-PFYDE-Acy-DE-Cha-W-Aib-G | 8.4*10⁻⁷ | 0 |
| S306 | 1932 | F1 | — | 1 | GRVDWLQRNANFYDWFVAE-Acy-G | 2.2*10⁻⁶ | +++ |
| S312 | 1933 and | F1—F1 | N—N | 1—1 | 23-(Lig′-GGGFHENFYDWFVRQVSKK)₂ | 2.9*10⁻⁶ | ++ |
| | 1934 | | | | | | |
| S313 | 1935 and | F2—F2 | C—C | 1—1 | (SDGFYNAIELLS-Lig′)₂-23 | 2.4*10⁻⁷ | |
| | 1936 | | | | | | |
| S315 | 1937 | F1 | — | 1 | WFYDWFWE | 6.8*10⁻⁶ | 0 |
| S316 | 1938 | F10 | — | 1 | WQGYAWLS | 7.0*10⁻⁶ | 0 |
| S317 | 1939 | F10 | — | 1 | WPGYAWLS | >2*10⁻⁵ | 0 |
| S319 | 1940 | F1 | — | 1 | D-Aic-D-Aib-EFYDWFDEIPq | 8.7*10⁻⁷ | 0 |
| S320 | 1941 | F1 | — | 1 | KNNKEFYEWFDEiGq | 2.8*10⁻⁶ | 0 |
| S321 | 1942 | F1 | — | 1 | YeRD-Hyp-FYDWFDEiGq | 1.4*10⁻⁶ | 0 |
| S322 | 1943 | F1 | — | 1 | EWRD-Hyp-FYDWFDEi-Hyp-e | 7.2*10⁻⁷ | 0 |
| S325 | 1944 and | F1—F1 | N—N | 1—1 | 9-(Lig′-GSLDESFYDWFERQLGKK)₂ | 4.6*10⁻⁸ | +++++ |
| | 1945 | | | | | | |
| S326 | 1600 | F1 | — | 1 | GIISQSCPESFYDWFAGQVSDPWWCW | 5.9*10⁻⁷ | − |
| S327 | 1946 | F2 | — | 1 | TFYSCLASLLTGTPQPNRGPWERCRKK | 2.1*10⁻⁶ | − |
| S329 | 1947 and | F1—F1 | N—N | 1—1 | 17-(Lig′-FHENFYDWFVRQVSKK)₂ | 2.7*10⁻⁶ | ++ |
| | 1948 | | | | | | |
| S331 | 1949 | F4 | — | 2 | KHLCVLEELFWGASLFGYCSGKK | 1.6*10⁻⁶ | 0 |
| S332 | 1950 and | F1—F1 | C—C | 1—1 | (GSLDESFYDWFERQLGKK-Lig′)₂-9 | 2.1*10⁻⁸ | +++++ |
| | 1951 | | | | | | |
| S333 | 1952 and | F1—F1 | N—N | 1—1 | 22-(Lig′-GSLDESFYDWFERQLGKK)₂ | 1.4*10⁻⁷ | ++++ |
| | 1953 | | | | | | |
| S334 | 1954 and | F1—F1 | N—N | 1—1 | 22-(Lig′-GGGFHENFYDWFVRQVSKK)₂ | 1.6*10⁻⁶ | +++ |
| | 1955 | | | | | | |
| S335 | 1956 and | F1—F1 | C—C | 1—1 | (GSLDESFYDWFERQLGKK-Lig′)₂-22 | 9.8*10⁻⁸ | ++++ |
| | 1957 | | | | | | |
| S336 | 1958 and | F1—F1 | N—N | 1—1 | 23-(Lig′-GSLDESFYDWFERQLGKK)₂ | 1.5*10⁻⁸ | +++ |
| | 1959 | | | | | | |
| S337 | 1960 and | F1—F1 | C—C | 1—1 | (GSLDESFYDWFERQLGKK-Lig′)₂-23 | 1.1*10⁻⁸ | +++++ |
| | 1961 | | | | | | |
| S342 | 1962 | F1 | — | 1 | DLWFNAKEDMNFYDWFVWQLR | 1.8*10⁻⁶ | 0 |
| S344 | 1963 | F2 | — | 1 | EHWNTVDPFYHWISELLRESGA | 2.0*10⁻⁷ | 0 |
| S345 | 1964 | F2 | — | 1 | EHWNTVDPFYQYFAELLRESGA | 2.9*10⁻⁶ | 0 |
| S349 | 1965 and | F1—F1 | N—N | 1—1 | 23-(Lig′-GGGFHENFYDWFVRQVSKK)₂ | 1.3*10⁻⁷ | ++++ |
| | 1966 | | | | | | |
| S350 | 1967 and | F1—F1 | C—C | 1—1 | (GSLDESFYDWFERQLGKK-Lig′)₂-21 | 4.7*10⁻⁷ | ++++ |
| | 1968 | | | | | | |
| S351 | 1969 and | F1—F1 | N—N | 1—1 | 21-(Lig′-GSLDESFYDWFERQLGKK)₂ | 1.4*10⁻⁶ | +++ |
| | 1970 | | | | | | |
| S352 | 1971 and | F1—F1 | N—N | 1—1 | 21-(Lig′-GGGFHENFYDWFVRQVSKK)₂ | 6.6*10⁻⁷ | +++ |
| | 1972 | | | | | | |
| S353 | 1973 and | F1—F1 | C—C | 1—1 | (GSLDESFYDWFERQLGKK-Lig′)₂-14 | 1.1*10⁻⁸ | ++++++ |
| | 1974 | | | | | | |
| S354 | 1975 and | F1—F1 | N—N | 1—1 | 14-(Lig′-GSLDESFYDWFERQLGKK)₂ | 3.9*10⁻⁸ | ++++ |
| | 1976 | | | | | | |
| S359 | 1977 and | F1—F1 | N—N | 1—1 | 9-(Lig′-DWLQRNANFYDWFVAEL)₂ | 7.0*10⁻⁷ | + |
| | 1978 | | | | | | |
| S360 | 1979 and | F1—F1 | N—N | 1—1 | 23-(Lig′-DWLQRNANFYDWFVAEL)₂ | 9.9*10⁻⁷ | |
| | 1980 | | | | | | |
| S361 | 1981 and | F1—F1 | C—C | 1—1 | (GSLDESFYDWFEROLGKK-Lig′)₂-24 | 2.2*10⁻⁶ | +++ |
| | 1982 | | | | | | |
| S362 | 1983 and | F1—F1 | N—N | 1—1 | 24-(Lig′-GSLDESFYDWFERQLGKK)₂ | 1.1*10⁻⁷ | ++++ |
| | 1984 | | | | | | |
| S363 | 1985 and | F1—F1 | N—N | 1—1 | 24-(Lig′-GGGFHENFYDWFVRQVSKK)₂ | 2.2*10⁻⁷ | +++ |
| | 1986 | | | | | | |
| S365 | 1987 | F1 | — | 1 | RMYFSTGAPQNFYDWFVQEWD | 1.0*10⁻⁵ | 0 |
| S366 | 1988 | F1 | — | 1 | PLRESRNFYDWFVQQLE | 3.7*10⁻⁷ | 0 |
| S368 | 1989 | F2 | — | 1 | RGTRSDPFYHKLSELLQGH | >2*10⁻⁵ | 0 |
| S371 | 1558 | F1 | — | 1 | GSLDESFYDWFERQLGKK | 6.3*10⁻⁷ | + |
| S372 | 1990 | F1 | — | 1 | SGSLDESFYDWFERQLGKK | 2.0*10⁻⁷ | ++ |
| S373 | 1991 | F1 | — | 1 | GSLDESFYDWFERQLGKKK(S) | 1.2*10⁻⁷ | +++ |
| S374 | 1992 and | F1—F1 | N—N | 1—1 | 17-(Ald-GSLDESFYDWFERQLGKK)₂ | 1.8*10⁻⁷ | ++++ |
| | 1993 | | | | | | |
| S375 | 1994 | F1—F1 | C-N | 1—1 | (GSLDESFYDWFERQLGKKK-Ald)-14-(Ald- | 2.0*10⁻⁷ | ++++ |
| | | | | | GSLDESFYDWFERQLGKK) | | |
| S376 | 1995 and | F1—F1 | N—N | 1—1 | 19-(Ald-GSLDESFYDWFERQLGKK)₂ | 1.6*10⁻⁷ | ++++ |
| | 1996 | | | | | | |
| S378 | 1997 and | F1—F1 | C—C | 1—1 | (GSLDESFYDWFERQLGKKK-Ald)₂-17 | 6.5*10⁻⁸ | +++++ |
| | 1998 | | | | | | |
| S379 | 1999 and | F1—F1 | C—C | 1—1 | (GSLDESFYDWFERQLGKKK-Ald)₂-19 | 5.6*10⁻⁸ | +++++ |
| | 2000 | | | | | | |
| S380 | 2001 and | F1—F1 | C—C | 1—1 | (EEDWLQRNANFYDWFVAEL-Lig′)₂-9 | 5.1*10⁻⁷ | ++ |
| | 2002 | | | | | | |
| S381 | 2003 and | F1—F1 | C—C | 1—1 | (EEDWLQRNANFYDWFVAEL-Lig′)₂-23 | 1.2*10⁻⁷ | ++++ |
| | 2004 | | | | | | |
| S386 | 1559 | F1 | — | 1 | GSLDESFYDWFERQLG | 3.2*10⁻⁷ | + |
| S387 | 2005 | F1 | — | 1 | SLDESFYDWFERQLG | 6.3*10⁻⁷ | + |
| S388 | 2006 | F1 | — | 1 | LDESFYDWFERQLG | 3.4*10⁻⁷ | + |
| S389 | 2007 | F1 | — | 1 | DESFYDWFERQLG | 1.1*10⁻⁶ | + |
| S390 | 1794 | F1 | — | 1 | ESFYDWFERQLG | 6.2*10⁻⁷ | + |
| S391 | 2008 | F1 | — | 1 | SFYDWFERQLG | 1.5*10⁻⁶ | + |
| S392 | 2009 | F1 | — | 1 | FYDWFERQLG | 3.8*10⁻⁶ | 0 |
| S394 | 1788 | F1 | — | 1 | GSLDESFYDWFERQ | 9.1*10⁻⁸ | + |
| S395 | 1787 | F1 | — | 1 | GSLDESFYDWFERQL | 8.1*10⁻⁸ | ++ |
| S396 | 1789 | F1 | — | 1 | GSLDESFYDWFER | >2*10⁻⁵ | 0 |
| S397 | 2010 | F1 | — | 1 | GSLDESFYDWFE | >2*10⁻⁵ | 0 |
| S398 | 2011 | F1 | — | 1 | GSLDESFYDWF | >2*10⁻⁵ | 0 |
| S399 | 1790 | F1 | — | 1 | ESFYDWFERQL | 9.5*10⁻⁸ | ++ |
| S400 | 1791 | F1 | — | 1 | ESFYDWFERQ | 6.3*10⁻⁷ | 0 |
| S401 | 2012 | F1 | — | 1 | ESFYDWFER | >2*10⁻⁵ | 0 |
| S402 | 2013 | F1 | — | 1 | ESFYDWFE | >2*10⁻⁵ | 0 |
| S403 | 2014 | F1 | — | 1 | ESFYDWF | >2*10⁻⁵ | 0 |
| S414 | 2015 and | F1—F1 | C—C | 1—1 | (ESFYDWFERQLGK-Lig′)₂-14 | 3.8*10⁻⁷ | ++++ |
| | 2016 | | | | | | |
| S415 | 2017 and | F1—F1 | C—C | 1—1 | (ESFYDWFERQLGK-Lig′)₂-23 | 1.0*10⁻⁷ | ++++ |
| | 2018 | | | | | | |
| S416 | 2019 and | F1—F1 | N—N | 1—1 | 14-(Lig′-ESFYDWFERQLG)₂ | 9.3*10⁻⁷ | +++ |
| | 2020 | | | | | | |
| S417 | 2021 and | F1—F1 | N—N | 1—1 | 23-(Lig′-ESFYDWFERQLG)₂ | 9.2*10⁻⁷ | +++ |
| | 2022 | | | | | | |
| S418 | 2023 and | F1—F1 | C—C | 1—1 | (ESFYDWFERQLGK-Ald)₂-17 | 1.2*10⁻⁷ | ++++ |
| | 2024 | | | | | | |
| S419 | 2025 and | F6—F6 | N—N | 2—2 | 14-(Lig′-EWLDQEWAWVQCEVYGRGCPSEE)₂ | | 0 |
| | 2026 | | | | | | |
| S420 | 2027 and | F1—F1 | N—N | 1—1 | 17-(Ald-ESFYDWFERQLG)₂ | | ++ |
| | 2028 | | | | | | |
| S423 | 2029 and | F1-F8 | C—C | 1-3 | ESFYDWFERQLG | 6.2*10⁻⁸ | 0 |
| | 2030 | | | | K | | |
| | | | | | ACAWPTYWNCG | | |
| S425 | 2031 | F1-F6 | C-N | 1-2 | GSLDESFYDWFERQLGKK-Lig′-14-Lig′- | 2.4*10⁻⁹ | − |
| | | | | | EWLDQEWAWVQCEVYGRGCPSEE | | |
| S429 | 2032 | F6-F1 | C-N | 2-1 | EWLDQEWAWVQCEVYGRGCPSEE-Lig′-14- | 6.0*10⁻¹⁰ | |
| | | | | | Lig′-GSLDESFYDWFERQLGKK | | |
| S432 | 2033 and | F1-F6 | C—C | 1-2 | ESFYDWFERQLGGGG | 1.8*10⁻⁷ | + |
| | 2034 | | | | K | | |
| | | | | | CEVYGRGCPS | | |
| S433 | 2035 and | F1-F6 | C—C | 1-2 | ESFYDWFERQLGGGG | 1.1*10⁻⁷ | + |
| | 2036 | | | | K | | |
| | | | | | WLDQEWAWVQ | | |
| S436 | 2037 and | F1-F6 | C—C | 1-2 | ESFYDWFERQLGGGG | 5.2*10⁻¹⁰ | +++ |
| | 2038 | | | | K | | |
| | | | | | WLDQEWAWVQCEVYGRGCPS | | |
| S437 | 2039 and | F1-F6 | C—C | 1-2 | ESFYDWFERQLGGGG | 6.9*10⁻¹⁰ | +++ |
| | 2040 | | | | K | | |
| | | | | | LDQEWAWVQCEVYGRGCPS | | |
| S438 | 2041 and | F1-F6 | C—C | 1-2 | ESFYDWFERQLGGGG | 3.0*10⁻⁸ | ++ |
| | 2042 | | | | K | | |
| | | | | | DQEWAWVQCEVYGRGCPS | | |
| S439 | 2043 and | F1-F6 | C—C | 1-2 | ESFYDWFERQLGGGG | 4.6*10⁻⁸ | |
| | 2044 | | | | K | | |
| | | | | | QEWAWVQCEVYGRGCPS | | |
| S440 | 2045 and | F1-F6 | C—C | 1-2 | ESFYDWFERQLGGGG | 9.9*10⁻⁸ | |
| | 2046 | | | | K | | |
| | | | | | EWAWVQCEVYGRGCPS | | |
| S441 | 2047 and | F1-F6 | C—C | 1-2 | ESFYDWFERQLGGGG | 1.2*10⁻⁷ | |
| | 2048 | | | | K | | |
| | | | | | WAWVQCEVYGRGCPS | | |
| S442 | 2049 and | F1-F6 | C—C | 1-2 | ESFYDWFERQLGGGG | 1.6*10⁻⁷ | |
| | 2050 | | | | K | | |
| | | | | | AWVQCEVYGRGCPS | | |
| S443 | 2051 and | F1-F6 | C—C | 1-2 | ESFYDWFERQLGGGG | 1.7*10⁻⁷ | |
| | 2052 | | | | K | | |
| | | | | | WVQCEWGRGCPS | | |
| S444 | 2053 and | F1-F6 | C—C | 1-2 | ESFYDWFERQLGGGG | 1.9*10⁻⁷ | |
| | 2054 | | | | K | | |
| | | | | | VQCEVYGRGCPS | | |
| S445 | 2055 and | F1-F6 | C—C | 1-2 | ESFYDWFERQLGGGG | 2.3*10⁻⁷ | |
| | 2056 | | | | K | | |
| | | | | | QCEVYGRGCPS | | |
| S453 | 2057 | F1-F6 | C-N | 1-2 | GSLDESFYDWFERQLGKKK-Ald-17-Ald- | 5.7*10⁻¹⁰ | − |
| | | | | | KEWLDQEWAWVQCEVYGRGCPSEE | | |
| S454 | 2058 and | F1-F6 | C—C | 1-2 | GSLDESFYDWFERQLGKKK-Ald | 3.8*10⁻¹⁰ | +++ |
| | 2059 | | | | 17 | | |
| | | | | | EWLDQEWAWVQCEVYGRGCPSEEK-Ald | | |
| S455 | 2060 | F6-F1 | C-N | 2-1 | EWLDQEWAWVQCEVYGRGCPSEEK-Ald-18- | 1.1*10⁻⁹ | ++++ |
| | | | | | Ald-GSLDESFYDWFERQLGKK | | |
| S456 | 2061 and | F1-F6 | N—N | 1-2 | Ald-GSLDESFYDWFERQLGKK | 2.4*10⁻⁹ | +++ |
| | 2062 | | | | 17 | | |
| | | | | | Ald-KEWLDQEWAWVQCEVYGRGCPSEE | | |
| S457 | 2063 | F6-F1 | C-N | 2-1 | WLDQEWAWVQCEVYGRGCPSGGSGGSGSLDESFYDWFERQLG | 1.6*10⁻⁹ | ++++ |
| S458 | 2064 | F6-F1 | C-N | 2-1 | WLDQEWAWVQCEVYGRGCPSGGSGGSGSLDESFYDWFERQLG | 3.2*10⁻⁹ | ++++ |
| S459 | 2065 | F1-F6 | C-N | 1-2 | GSLDESFYDWFERQLGGGSGGSWLDQEWAWVQCEVYGRGCPS | 7.6*10⁻¹¹ | − |
| S467 | 2066 | F6-F1 | C-N | 2-1 | EWLDQEWAWVQCEVYGRGCPSEEK-Ald-16- | 6.8*10⁻¹⁰ | ++++ |
| | | | | | Ald-GSLDESFYDWFERQLGKK | | |
| S468 | 2067 | F6-F1 | C-N | 2-1 | EWLDQEWAWVQCEVYGRGCPSEEK-Ald-19-Ald- | 4.0*10⁻¹⁰ | ++++ |
| | | | | | GSLDESFYDWFERQLGKK | | |
| S471 | 2068 | F6-F1 | C-N | 2-1 | LDQEWAWVQCEVYGRGCPSESFYDWFERQLG | 6.7*10⁻¹⁰ | ++++ |
| S481 | 2069 | F6-F1 | C-N | 2-1 | HHHHHHKLDQEWAWVQCEVYGRGCPSESFYDWFERQLG | | |
| S482 | 2070 | F6-F1 | C-N | 2-1 | LDQEWAWVQCEVYGRGCPSESFYDWFERQLG | | |
| S483 | 2071 | F6-F1 | C-N | 2-1 | LDEWAWVQCVEYGRGCPSESFYDWFERQLG | 5.2*10⁻⁸ | 0 |
| S484 | 2072 | F6-F1 | C-N | 2-1 | LDQEWAVQCEVYGRGCPSESFYDWFERQLG | 8.7*10⁻⁸ | 0 |
| S485 | 2073 | F6-F1 | C-N | 2-1 | LDQEWAWVCEVYGRGCPSESFYDWFERQLG | 1.6*10⁻⁷ | 0 |
| S486 | 2074 | F6-F1 | C-N | 2-1 | LDQEWAWVQCVYGRGCPSESFYDWFERQLG | 5.7*10⁻⁸ | 0 |
| S487 | 2075 | F6-F1 | C-N | 2-1 | LDQEWAWVQCEVYGRCPSESFYDWFERQLG | | |
| S488 | 2076 | F6-F1 | C-N | 2-1 | LDQEWAWVQCEVYGRGCSESFYDWFERQLG | | |
| S489 | 2077 | F6-F1 | C-N | 2-1 | LDQEWAWVQCEVYGRGCPESFYDWFERQLG | | |
| S490 | 2078 | F6-F1 | C-N | 2-1 | LDQEWAWVQCEVYGRGCESFYDWFERQLG | | |
| S491 | 2079 | F6-F1 | C-N | 2-1 | LDQEWAWVQCEVYGRGCPSEFYDWFERQLG | | |
| S492 | 2080 | F6-F1 | C-N | 2-1 | LDQEWAWVQCEVYGRGCPSESFYDWFRQLG | | |
| S493 | 2081 | F6-F1 | C-N | 2-1 | EWLDQEWAWVQCEVYGRGCPSEE-POX-Lys(biotin) | | |
| S494 | 2082 | F6-F1 | C-N | 2-1 | ADQEWAWVQCEVYGRGCPSESFYDWFERQLG | 1.7*10⁻⁸ | + |
| S495 | 2083 | F6-F1 | C-N | 2-1 | LAQEWAWVQCEVYGRGCPSESFYDWFERQL | | |
| S496 | 2084 | F6-F1 | C-N | 2-1 | LDAEWAWVQCEVYGRGCPSESFYDWFERQL | | |
| S497 | 2085 | F6-F1 | C-N | 2-1 | LDQAWAWVQCEVYGRGCPSESFYDWFERQL | 2.5*10⁻⁹ | +++ |
| S498 | 2086 | F6-F1 | C-N | 2-1 | LDQEAAWVQCEVYGRGCPSESFYDWFERQL | 5.6*10⁻⁸ | + |
| S499 | 2087 | F6-F1 | C-N | 2-1 | LDQEWAAVQCEVYGRGCPSESFYDWFERQL | 6.2*10⁻¹⁰ | ++++ |
| S500 | 2088 | F6-F1 | C-N | 2-1 | LDQEWAWAQCEVYGRGCPSESFYDWFERQL | | |
| S501 | 2089 | F6-F1 | C-N | 2-1 | LDQEWAWVACEVYGRGCPSESFYDWFERQL | | |
| S502 | 2090 | F6-F1 | C-N | 2-1 | LDQEWAWVQCAVYGRGCPSESFYDWFERQL | 3.0*10⁻⁹ | +++ |
| S503 | 2091 | F6-F1 | C-N | 2-1 | LDQEWAWVQCEAYGRGCPSESFYDWFERQL | | |
| S504 | 2092 | F6-F1 | C-N | 2-1 | LDQEWAWVQCEVAGRGCPSESFYDWFERQL | | |
| S505 | 2093 | F6-F1 | C-N | 2-1 | LDQEWAWVQCEVYARGCPSESFYDWFERQL | | |
| S506 | 2094 | F6-F1 | C-N | 2-1 | LDQEWAWVQCEVYGAGCPSESFYDWFERQL | | |
| S507 | 2095 | F6-F1 | C-N | 2-1 | LDQEWAWVQCEVYGRACPSESFYDWFERQL | | |
| S508 | 2096 | F6-F1 | C-N | 2-1 | LDQEWAWVQCEVYGRGCASESFYDWFERQL | | |
| S509 | 2097 | F6-F1 | C-N | 2-1 | LDQEWAWVQSEVYGRGSPSESFYDWFERQL | | |
| S510 | 2098 | F6-F1 | C-N | 2-1 | SLEEEWAQVECEVYGRGCPSGGSGGSGLLDESFYHWFDRQLR | 6.2*10⁻¹¹ | +++++ |
| S511 | 2099 | F6-F1 | C-N | 2-1 | WLDQEWAWVQCEVYGRGCPSGGSGGSGRVDWLQRNANFYDWFVAELG | 3.8*10⁻⁹ | ++ |
| S512 | 2100 | F6-F1 | C-N | 2-1 | WLDQEWAWVQCEVYGRGCPSGGSGGSSQAGSAFYAWFDQVLRTV | 2.8*10⁻⁸ | ++ |
| S513 | 2101 | F6-F1 | C-N | 2-1 | WLDQEWAWVQCEVYGRGCPSGGSGGSQSDAFYSGLWALIGLSDG | | |
| S515 | 2102 | F6 | — | 2 | LDQEWAWVQCEVYGRGCPSPOX-Lys(Biotin) | | |
| S516 | 2103 | F4-F1 | C-N | 2-1 | H-Acy-CLEEwGASL-Tic-QCSGSESFYDWFERQL | | |
| S517 | 2104 | F6-F1 | C-N | 2-1 | SIEEEWAQIKCDVWGRGCPSESFYDWFERQL | | |
| S518 | 2105 | F6-F1 | C-N | 2-1 | RLEEEWAWVQCEVYGRGCPSGSLDESFYDWFERQLG | 1.6*10⁻¹⁰ | +++++ |
| S519 | 2106 | F6-F1 | C-N | 2-1 | SLEEEWAQVECEVYGRGCPSGSLDESFYDWFERQLG | 2.0*10⁻¹¹ | +++++++ |
| S520 | 2107 | F6-F1 | C-N | 2-1 | SIEEEWAQIKCDVWGRGCPPGLLDESFYHWFDRQLR | 2.0*10⁻¹¹ | ++++++ |
| S521 | 2108 | F4-F1 | C-N | 2-1 | HLCVLEELFWGASLFGYCSGGSLDESFYDWFERQL | 2.7*10⁻⁸ | + |
| S522 | 2109 | F4-F1 | C-N | 2-1 | HLCVLEELFWGASLFGYCSGGRVDWLQRNANFYDWFVAELG | | |
| S523 | 2110 | F6-F10 | C-N | 2-1 | WLDQEWAWVQCEVYGRGCPSDSDWAGYEWFEEQLD | 4.3*10⁻⁹ | ++ |
| S524 | 2111 | F6-F1 | C-N | 2-1 | HHHHHHKSLEEEWAQVECEVYGRGCPSGSLDESFYDWFERQLG | | |
| 7, 9, 12, 13, 14, 17, 19, 20, 21, 22, 23, and 24 represent specific chemical linkers (see Table 3); For FFC: 0 is no effect, + is agonist, − is antagonist. | | | | | | | |
| Peptides listed on 3 lines consist of two different peptides, linked N—N or C—C, either by chemical linkage or by being synthesized on the two branches of an amino acid with two amino groups such as, e.g., lysine. Acy = 1-amino-1-cyclohexanecarboxylic acid; Cha = cyclohexylalanine; Aib = 2-aminoisobutyric acid; Hyp = Hydroxyproline; Amino acids which are not capitalized are D-amino acids; | | | | | | | |
| #Lig = Diaminopropionic acid with a 2-aminohydroxyacetyl group (CO-CH2-O-NH2) on the side chain amino group; Lig′ = lysine with a 2-aminohydroxyacetyl group (CO-CH2-O-NH2) on the side chain amino group; Ald = an aldehyde group obtained by periodate oxidation of a serine, either N-terminal or attached to the side chain amino group of lysine. | | | | | | | |

[0366] Results further indicated that S175-S175 dimer peptides (Site 1-Site 1) were less agonistic than S175 monomer peptides (++vs. +++). S175-S175 dimer peptides having a C—N linkage were less agonistic or equally agonistic as compared to S175-S175 dimer peptides having C—C or N—N linkages. F8-F8 dimer peptides, like the parent monomer, showed no agonist activity.

### Example 5

### Substrate Phosphorylation Assay (HIR Kinase)

[0367] WGA (wheat germ agglutinin)-purified recombinant human insulin receptor was mixed with either insulin or peptide in varying concentrations in substrate phosphorylation buffer (50 mM HEPES (pH 8.0), 3 mM MnCl₂, 10 mM MgCl₂, 0.05% Triton X-100, 0.1% BSA, 12.5 μM ATP). A synthetic biotinylated substrate peptide (Biotin-KSRGDYMTMQIG) was added to a final concentration of 2 μg/ml. Following a 1 h incubation at RT, the reactions were stopped by the addition of 50 mM EDTA. The reactions were transferred to Streptavidin coated 96-well microtiter plates (NUNC, Cat. No. 236001) and incubated for 1 h at RT. The plates were washed 3 times with TBS (10 mM Tris (pH 8.0), 150 mM NaCl).

[0368] Subsequently, a 2000-fold dilution of horseradish peroxidase (HRPO) conjugated phosphotyrosine antibody (Transduction Laboratories, Cat. No. E120H) in TBS was added. The plates were incubated for 30 min and washed 3 times with TBS. TMB (3,3′,5,5′-tetramethylbenzidine; Kem-En-Tec, Copenhagen, Denmark) was added. One substrate from Kem-En-Tec was added. After 10-15 min, the reaction was stopped by the addition of 1% acetic acid. The absorbance, representing the extent of substrate phosphorylation, was measured in a spectrophotometer at a wavelength of 450 nM.

[0369] The results indicated that the potency of the Site 1-Site 2 dimer, peptide 539, was 0.1 to 1% of that of insulin in all assays tested (Table 8), and the dose-response curves (FIGS. 17A-17B) had a shape similar to that of insulin dose-response curves, suggesting an insulin-like action mechanism. In addition, Site 1-Site 2 dimer peptides 537 and 538 were also active as specific insulin receptor antagonists (Table 8; FIGS. 16A-16C). Notably, Site 2-Site 1 dimer peptide 539 was more active in the kinase assay than Site 1-Site 1 homodimer peptides 521 and 535 (FIGS. 19A-19B), despite lower FFC potency (FIGS. 14A-14C; FIGS. 17A-17B). Similar results are shown in FIGS. 20A-B and FIGS. 21A-B. This data suggested that homodimer and heterodimer peptides used different mechanisms of action.

TABLE 8

| | | | | | | | | | |
|---|---|---|---|---|---|---|---|---|---|
| | | | | | | HIR | HIGF- | FFC | Kinase |
| | Mon./ | | SEQ ID | | Site | K_{d} | 1R K_{d} | Pot. | Pot. |
| Pep. | Link. | Sequence | NO: | Form | IR | (nM) | (nM) | (nM) | (nM) |

| | | | | | | | | | |
|---|---|---|---|---|---|---|---|---|---|
| HI | | | | na | na | | | | |
| HIGF- | | | | na | na | | | | |
| 1R | | | | | | | | | |
| 521 | RP9- | MADYKDDDDKGSLDESFYDWFE | 2112 | 1—1 | 1—1 | 25 | — | A 3 | 1400 |
| | 6aa- | RQLGKKGGSGGSGSLDESFYDW | | | | | | | |
| | RP9 | FERQLGKKAAA(ETAG)PG | | | | | | | |
| 535 | RP9- | MADYKDDDDKGSLDESFYDWFE | 2113 | 1—1 | 1—1 | 15 | — | A 2 | 1000 |
| | 12aa- | RQLGKKGGSGGSGGSGGSGSL | | | | | | | |
| | RP9 | DESFYDWFERQLGKKAAA(ETAG) | | | | | | | |
| | | PG | | | | | | | |
| 537 | RP9- | MADYKDDDDKGSLDESFYDWFE | 2114 | 1-6 | 1-2 | 0.092 | 980 | N 10 | Inactive |
| | 6aa- | RQLGKKGGSGGSWLDQEWAWV | | | | | | | |
| | D8 | QCEVYGRGCPSAAA(ETAG)PG | | | | | | | |
| 538 | RP9- | MADYKDDDDKGSLDESFYDWFE | 2115 | 1-6 | 1-2 | 0.080 | 710 | N 10 | Inactive |
| | 12aa- | RQLGKKGGSGGSGGSGGSWLD | | | | | | | |
| | D8 | QEWAWVQCEVYGRGCPSAAA(E | | | | | | | |
| | | TAG)PG | | | | | | | |
| 539 | D8- | MADYKDDDDKWLDQEWAWVQC | 2116 | 6-1 | 2-1 | 0.530 | 1500 | A 10 | 110 |
| | 6aa- | EVYGRGCPSGGSGGSGSLDESF | | | | | | | |
| | RP9 | YDWFERQLGKKAAA(ETAG)PG | | | | | | | |

A = agonist; N = antagonist; na = not applicable; Form. = formula; Mon. = constituent monomers; Link. = linker; Pot. = potency; HI and HIGF-1R are controls; All with tags at both ends; All dimers are linked C-N; Linker sequences are underlined.

### Example 6

### IR Autophosphorylation Assays

[0370] IR activation was assayed by detecting autophosphorylation of an insulin receptor construct transfected into 32D cells (Wang et al., 1993, Science 261:1591-1594; clone 969). The IR transfected 32D cells were seeded at 5×10⁶ cells/well in 96-well tissue culture plates and incubated overnight at 37° C. Samples were diluted 1:10 in the stimulation medium (PRIM1640 with 25 nM HEPES pH 7.2) plus or minus insulin. The culture media was decanted from the cell culture plates, and the diluted samples were added to the cells. The plates were incubated at 37° C. for 30 min. The stimulation medium was decanted from the plates, and cell lysis buffer (50 mM HEPES pH 7.2, 150 mM NaCl, 0.5% Triton X-100, 1 mM AEBSF, 10 KIU/ml aprotinin, 50 μM leupeptin, and 2 mM sodium orthovanadate) was added. The cells were lysed for 30 min.

[0371] In the ELISA portion of the assay, the cell lysates were added to the BSA-blocked anti-IR unit mAb (Upstate Biotechnology, Lake Placid, N.Y.) coated ELISA plates. After a 2 h incubation, the plates were washed 6 times with PBST and biotinylated anti-phosphotyrosine antibody (Upstate Biotechnology) is added. After another 2 h incubation, the plates were again washed 6 times. Streptavidin-Eu was then added, and the plates were incubated for 1 h. After washing the plates again, EG&G Wallac enhancement solution (100 mM acetone-potassium hydrogen pthalate, pH 3.2; 15 mM 2-naphtyltrifluoroacetate; 50 mM tri(n-octyl)-phosphine oxide; 0.1% Triton X-100) was added into each well, and the plates were placed onto a shaker for 20 min at RT. Fluorescence of samples in each well was measured at 615 nm using a VICTOR 1420 Multilabel Counter (EG&G Wallac).

[0372] Alternatively, IR autophosphorylation was determined using a holoenzyme phosphorylation assay. In accordance with this assay, 1 μl of purified insulin receptor (isolated from a Wheat Germ Agglutinin Expression System) was incubated with 25 nM insulin, or 10 or 50 μM peptide in 50 μl autophosphorylation buffer (50 mM HEPES pH. 8.0, 150 mM NaCl, 0.025% Triton-X-100, 5 mM MnCl₂, 50 μM sodium orthovanadate) containing 10 μM ATP for 45 min at 22° C. The reaction was stopped by adding 50 μl of gel loading buffer containing β-mercaptoethanol (Bio-Rad Laboratories, Inc., Hercules, Calif.). The samples were run on 4-12% SDS-polyacrylamide gels. Western Blot analysis was performed by transferring the proteins onto nitrocellulose membrane. The membrane was blocked in PBS containing 3% milk overnight. The membrane was incubated with anti-phosphotyrosine 4G10 HRP labeled antibody (Upstate Biotechnology) for 2 h. Protein bands were visualized using SuperSignal West Dura Extended Duration Substrate Chemiluminescence Detection System (Pierce Chemical Co.).

### Example 7

### Fluorescence-Based HIR Binding Assays

[0373] A. Time-Resolved Fluorescence Resonance Energy Transfer Assays

[0374] Time-resolved fluorescence resonance energy transfer assays (TR-FRET) were used for peptide competition studies. In one set of assays, monomer and dimer peptides were tested for the ability to compete with biotinylated RP9 monomer peptide (b-RP9) for binding to HIR-immunoglobulin heavy chain chimera (sIR-Fc; Bass et al., 1996). The assays were performed using a 384-well white microplate (NUNC) with a final volume of 30 μl. Final incubation conditions were in 22 nM b-RP9, 1 nM SA-APC (streptavidin-allophycocyanin), 1 nM Eu³⁺-sIR-Fc (LANCE™ labeled, PE Wallac, Inc.), 0.05 M Tris-HCl (pH 8 at 25° C.), 0.138 M NaCl, 0.0027 M KCl, and 0.1% BSA (Cohn Fraction V). After 16-24 h of incubation at RT, the fluorescence signal at 665 nm and 620 nm was read on a Victor^{2 1420} plate reader (PE Wallac, Inc.). Primary data were background corrected, normalized to buffer controls, and then expressed as percent of specific binding.

[0375] Results are shown in FIGS. 22A-22B. FIG. 21A shows b-RP9 competition data. For these figures, the Z′-factor was greater than 0.5 (Z′=1−(3σ₊3σ₋)/|μ₊−μ₋|; Zhang et al., 1999, J. Biomol. Screen. 4:67-73), and the signal-to-background (S/B) ratio was ˜4-5. In FIG. 22A, each data point represents the average of two replicate wells. The lines represent the best fit to a four-parameter non-linear regression analysis of the data according to the following formula: y=min+(max−min)/(1+10ˆ((logIC₅₀−x)*Hillslope)). This was used to determine IC₅₀ values.

[0376] In another set of assays, monomer and dimer peptides were tested for the ability to compete with biotinylated-S175 (b-S175) or b-RP9 for binding to sIR-Fc. The TR-FRET assays were performed in a 384-well white microplate with a final volume of 30 μl. Final incubation conditions were in 33 nM b-S175 or 22 nM b-RP9, 1 nM SA-APC, 1 nM Eu³⁺-sIR-Fc, 0.05 M Tris-HCl (pH 8 at 25° C.), 0.138 M NaCl, 0.0027 M KCl, and 0.1% BSA. After 16-24 h of incubation at RT, the fluorescence signal at 665 nm and 620 nm was read on a Victor^{2 1420} plate reader. Primary data were background corrected, normalized to buffer controls, and then expressed as % specific binding.

[0377] Results are shown in FIGS. 23A-23B. For these figures, each data point represents the average of two replicate wells. The lines represent the best fit to a four-parameter non-linear regression analysis of the data, which was used to determine IC₅₀ values. FIG. 23A shows b-S175 competition data; FIG. 23B shows b-RP9 competition data.

[0378] B. Fluorescence Polarization Assays

[0379] Fluorescence polarization assays (FP) were used for peptide competition studies. In one set of assays monomer and dimer peptides were tested for the ability to compete with fluorescein-RP9 (FITC-RP9) for binding to soluble HIR ectodomain (sIR; Kristensen et al., 1998, J. Biol. Chem. 273:17780-17786). The assays were performed in a 384-well black microplate (NUNC) with a final volume of 30 μl. Final incubation conditions were 1 nM FITC-RP9, 10 nM sIR, 0.05 M Tris-HCl (pH 8 at 25° C.), 0.138 M NaCl, 0.0027 M KCl, 0.05% BGG (bovine gamma globulin), 0.005% Tween-20®. After 16-24 h of incubation at RT, the fluorescence signal at 520 nm was read on an Analyst™ AD plate reader (LJL BioSystems, Inc.). Primary data were background corrected using 10 nM sIR without FITC-RP9 addition, normalized to buffer controls, and then expressed as percent of specific binding. The Z′-factor was greater than 0.5 and the assay dynamic range was ˜125 mP. In FIGS. 24-27, each data point represents the average of two replicate wells. The lines represent the best fit to a four-parameter non-linear regression analysis of the data, which was used to determine IC₅₀ values. The Z′-factor was greater than 0.5 and the assay dynamic range was 125 mP. Results are shown in FIGS. 24A-24B.

[0380] In another set of assays, monomer and dimer peptides were tested for the ability to compete with FITC-RP9 for binding to soluble human insulin mini-receptor (mIR; Kristensen et al., 1999, J. Biol. Chem. 274:37351-37356). The FP assays were performed in a 384-well black microplate with a final volume of 30 μl. Final incubation conditions were 2 nM FITC-RP9, 20 nM mIR, 0.05 M Tris-HCl (pH 8 at 25° C.), 0.138 M NaCl, 0.0027 M KCl, 0.001% BGG, 0.005% Tween-20®. After 16-24 h of incubation at RT, the fluorescence signal at 520 nm was read on an Analyst™ AD plate reader. Primary data were background corrected using 20 nM mIR without FITC-RP9 addition, normalized to buffer controls and then expressed as percent of specific binding. Results are shown in FIGS. 25A-25B.

[0381] Monomers and dimer peptides were also tested for the ability to compete with fluorescein-insulin (FITC-Insulin) for binding to sIR. The FP assays were performed in a 384-well black microplate with a final volume of 30 μl. Final incubation conditions were in 2 nM FITC-Insulin, 20 nM SIR, 0.05 M Tris-HCl (pH 8 at 25° C.), 0.138 M NaCl, 0.0027 M KCl, 0.05% BGG, 0.005% Tween-200. After 16-24 h of incubation at RT, the fluorescence signal at 520 nm was read on an Analyst™ AD plate reader. Primary data were background corrected using 20 nM sIR without FITC-Insulin addition, normalized to buffer controls and then expressed as percent of specific binding. Results are shown in FIGS. 26A-26B.

[0382] In other assays, peptide monomers and dimer peptides were tested for the ability to compete with FITC-Insulin for binding to mIR. The FP assays were performed in a 384-well black microplate with a final volume of 30 μl. Final incubation conditions were 2 nM FITC-Insulin, 20 nM mIR, 0.05 M Tris-HCl (pH 8 at 25° C.), 0.138 M NaCl, 0.0027 M KCl, 0.05% BGG (bovine gamma globulin), 0.005% Tween-20®. After 16-24 h of incubation at RT, the fluorescence signal at 520 nm was read on an Analyst™ AD plate reader. Primary data were background corrected using 20 nM mIR without FITC-RP9 addition, normalized to buffer controls and then expressed as % specific binding. Results are shown in FIGS. 27A-27B.

[0383] C. Summary

[0384] Table 9, below, summarizes the binding data calculated from competition assays using the IR constructs, sIR-Fc, sIR, and mIR, in TR-FRET and FP formats. The data in Table 9 indicate that most dimer peptides (e.g., S291 and S375 or S337), showed greater agonist activity than the corresponding monomer peptides (e.g., H2C or RP9, respectively) in the FFC assay. It was previously demonstrated that an inequality between monomer peptides and insulin was exhibited in competition assays where the assay reporter was a monomer peptide (i.e., RP9 or S175). This inequality was also demonstrated by dimer peptides as seen in Table 9. Table 9 further shows that Group 6 monomer peptides such as E8 (D120) were able to compete with FITC-RP9 or b-RP9 peptides for binding to sIR-Fc, but did not compete peptide ligands, such as FITC-RP9 for binding to mIR. Experiments using different IR constructs thereby allowed differentiation of Site I peptides based on sequence motifs (i.e., Group 6 (Formula 10) vs. Group 1 (Formula 1; A6)).

TABLE 9

| | | | |
|---|---|---|---|
| | sIR-Fc | sIR-Fc | sIR-Fc |
| TARGET [symbol] | b-S175 | b-RP9 | FITC-RP9 |
| Label [symbol] | FRET | FRET | FP |

| | | | | | | | | | |
|---|---|---|---|---|---|---|---|---|---|
| Monomer | SEQ ID | Link- | | IC50 | | IC50 | | IC50 | |
| or Dimer | NO: | age | Sequence | (nM) | Hill | (nM) | Hill | (nM) | Hill |

| | | | | | | | | | |
|---|---|---|---|---|---|---|---|---|---|
| H2C | 2117 | | FHENFYDWFVQRVSKK | 410 | −0.82 | 1626 | −1.03 | 50 | −0.27 |
| S291 | 1916 | N—N | (Lig-GGG-H2C)₂-9 | 81 | −0.96 | 250 | −0.69 | | |
| | and | | | | | | | | |
| | 1917 | | | | | | | | |
| RP9 | 1558 | | GSLDESFYDWFERQLGKK | 6 | −0.45 | 42 | −0.69 | 10 | −0.41 |
| S375 | 1994 | C-N | (RP9-Lig)-14-(RP9- | 7 | −0.80 | 86 | −0.67 | | |
| | | | Lig) | | | | | | |
| S337 | 1960 | C—C | (RP9-Lig)₂-23 | 0.2 | −0.36 | 14 | −0.57 | 1 | −0.37 |
| | and | | | | | | | | |
| | 1961 | | | | | | | | |
| S391 | 2008 | | truncated-(-GSLDE)RP9 | 59 | −0.59 | 610 | −0.56 | | |
| | | | (-KK) | | | | | | |
| S390 | 1794 | | truncated(-GSLD)RP9(- | 27 | −0.49 | 127 | −0.49 | | |
| | | | KK) | | | | | | |
| S414 | 2015 | C—C | (truncated(-GSLD)RP9 | 92 | −0.62 | 164 | −0.73 | | |
| | and | | (-KK))₂-14 | | | | | | |
| | 2016 | | | | | | | | |
| S175 | 1560 | | GRVDWLQRNANFYDWFVAELG | 22 | −0.58 | 64 | −0.74 | 10 | −0.56 |
| S380 | 2001 | C—C | (EE-short-S175-Lig)₂- | 10 | −0.55 | 23 | −0.64 | | |
| | and | | 9 | | | | | | |
| | 2002 | | | | | | | | |
| E8 | 2118 | | GGTVWPGYEWLRNA | 755 | −0.74 | | | 207 | −0.49 |
| (D120) | | | | | | | | | |
| Insulin | | | | 59 | −0.37 | 63 | −0.46 | >100000 | −0.25 |

| | | | | |
|---|---|---|---|---|
| | sIR | mIR | HIR | |
| | | | ¹²⁵I- | |
| TARGET [symbol] | FITC-RP9 | FITC-RP9 | insulin | |
| Label [symbol] | FP | FP | RRA | FFC |

| | | | | | | | | |
|---|---|---|---|---|---|---|---|---|
| Monomer | SEQ ID | Link- | | IC50 | | IC50 | | IC50 |
| or Dimer | NO: | age | Sequence | (nM) | Hill | (nM) | Hill | (nM) |

| | | | | | | | | | |
|---|---|---|---|---|---|---|---|---|---|
| H2C | 2117 | | FHENFYDWFVQRVSKK | 37 | −0.49 | 770 | −0.89 | 700 | + |
| S291 | 1916 | N—N | (Lig-GGG-H2C)₂-9 | 12 | −0.35 | 668 | −0.38 | 1200 | ++++ |
| | and | | | | | | | | |
| | 1917 | | | | | | | | |
| RP9 | 1558 | | GSLDESFYDWFERQLGKK | 0.03 | −0.29 | 49 | −0.53 | 44 | +/0 |
| S375 | 1994 | C-N | (RP9-Lig)-14-(RP9- | 0.2 | −0.22 | 91 | −0.80 | 200 | ++++ |
| | | | Lig) | | | | | | |
| S337 | 1960 | C—C | (RP9-Lig)₂-23 | 0.2 | −0.28 | 111 | −0.70 | 11 | +++++ |
| | and | | | | | | | | |
| | 1961 | | | | | | | | |
| S391 | 2008 | | truncated-(-GSLDE)RP9 | 119 | −0.49 | 284 | −0.77 | 1500 | NN |
| | | | (-KK) | | | | | | |
| S390 | 1794 | | truncated(-GSLD)RP9(- | 19 | −0.64 | 94 | −0.94 | 620 | + |
| | | | KK) | | | | | | |
| S414 | 2015 | C—C | (truncated(-GSLD)RP9 | 0.2 | −0.25 | 151 | −0.69 | NN | NN |
| | and | | (-KK))₂-14 | | | | | | |
| | 2016 | | | | | | | | |
| S175 | 1560 | | GRVDWLQRNANFYDWFVAELG | 1 | −0.36 | 167 | −1.72 | 230 | +++ |
| S380 | 2001 | C—C | (EE-short-S175-Lig)₂- | 0.5 | −0.29 | 27 | −0.49 | 510 | ++ |
| | and | | 9 | | | | | | |
| | 2002 | | | | | | | | |
| E8 | 2118 | | GGTVWPGYEWLRNA | | | >100000 | | 2200 | − |
| (D120) | | | | | | | | | |
| Insulin | | | | 1250 | — | 172 | −0.78 | 0.04 | +++++ |

FRET = Time-Resolved Fluorescence Resonance Energy Transfer Assay; FP = Fluorescence Polarization Assay; RRA = Radio-Receptor Assay; FFC = Free Fat Cell Assay; N—N = N-terminal linkage; C—C = C-terminal linkage; All are site 1 (formula 1) monomers or site 1—site 1 (formula 1—formula 1) dimers;

[0385] Based on the functional studies outlined above, the following peptide dimers were designed.

| SEQ | | |
|---|---|---|
| ID | Monom./ | |
| NO: | Linkers | Sequence |
| 2119 | F8-6aa- | HLCVLEELFWGASLFGYCSGGGSGGSGSLDESFYDWFERQL |
| | RP9 | |
| 2120 | F8-12aa- | HLCVLEELFWGASLFGYCSGGGSGGSGGSGGSGSLDESFYDWFERQL |
| | RP9 | |
| 2121 | D8-6aa- | WLDQEWAWVQCEVYGRGCPSGGSGGSGRVDWLQRNANFYDWFVAELG |
| | S175 | |
| 2122 | D8-12aa- | WLDQEWAWVQCEVYGRGCPSGGSGGSGGSGGSGRVDWLQRNANFYDWFVAELG |
| | S175 | |
| 2123 | F8-6aa- | HLCVLEELFWGASLFGYCSGGGSGGSGRVDWLQRNANFYDWFVAELG |
| | S175 | |
| 2124 | F8-12aa- | HLCVLEELFWGASLFGYCSGGGSGGSGGSGGSGRVDWLQRNANFYDWFVAELG |
| | S175 | |
| 2125 | D8-6aa- | HLCVLEELFWGASLFGYCSGGGSGGSSQAGSAFYAWFDQVLRTV |
| | RP15 | |
| 2126 | D8-6aa- | HLCVLEELFWGASLFGYCSGGGSGGSTFYSCLASLLTGTPQPNRGPWERCR |
| | RP6 | |
| 2127 | D8-6aa- | HLCVLEELFWGASLFGYCSGGGSGGSQSDAFYSGLWALIGLSDG |
| | RP17 | |
| 2128 | D8-6aa- | HLCVLEELFWGASLFGYCSGGGSGGSDSDWAGYEWFEEQLD |
| | Grp 6 | |

[0386] Linker sequences are underlined and in bold; Monomer sequences are shown below; All dimers are linked C—N.

| | | | | |
|---|---|---|---|---|
| SEQ | | | | |
| ID | | Form- | | |
| NO: | Monomer | ula | Site | Sequence |

| | | | | |
|---|---|---|---|---|
| 1576 | F8 | 4 | 2 | HLCVLEELFWGASLFGYCSG |
| 1558 | RP9 | 1 | 1 | GSLDESFYDWFERQL |
| 2129 | D8 | 6 | 2 | WLDQEWAWVQCEVYGRGCPS |
| 1560 | S175 | 1 | 1 | GRVDWLQRNANFYDWFVAELG |
| 2130 | RP15 | 1 | 1 | SQAGSAFYAWFDQVLRTV |
| 1635 | Rp6 | 2 | 1 | TFYSCLASLLTGTPQPNRGPWERCR |
| 2131 | RP17 | 1 | 1 | QSDAFYSGLWALIGLSDG |
| 1595 | Group 6 | 10 | 1 | DSDWAGYEWFEEQLD |

### Example 8

### Peptide Fusions to the Maltose Binding Protein

[0387] A. Cloning

[0388] The transfer of interesting peptide sequences from phage display to maltose binding protein (MBP) fusions is desirable for several reasons. First, to obtain a more sensitive affinity estimate, the polyvalency of phage display peptides should be converted to a monovalent system. For this purpose, the peptide sequences are fused to MBP that generally exists as a monomer with no cysteine residues. Second, competition experiments can be carried out with the same or different peptides, one phage displayed and the other fused to MBP. Lastly, purified peptides can be obtained by cleavage of the fusion protein at a site engineered in the DNA sequence.

[0389] FIG. 28 shows a schematic drawing of the MBP-peptide construct. In the construct, the N-terminus of the peptide sequence is fused to the C-terminus of the MBP. Two peptide-flanking epitope tags are included, a shortened-FLAG® at the N-terminus and E-Tag at the C-terminus. The corresponding gene fusion was generated by ligating a vector fragment encoding the MBP in frame with a PCR product encoding the peptide of interest. The vector fragment was obtained by digesting the plasmid pMAL-c2 (New England Biolabs) with EcoRI and HindIII and then treating the fragment with shrimp alkaline phosphatase (SAP; Amersham). The digested DNA fragment was resolved on a 1% agarose gel, excised, and purified by QIAEXII (QIAGEN). The 20-amino acid peptide sequences of interest were initially encoded in the phage display vector pCANTAB5E (Pharmacia). To obtain these sequences, primers were synthesized which anneal to sequences encoding the shortened FLAG® or E-Tag epitopes and also contain the required restriction enzyme sites EcoRI and HindIII. PCR products were obtained from individual phage clones and digested with restriction enzymes to yield the insert fragment. The vector and insert were ligated overnight at 15° C. The ligation product was purified using QIAquick spin columns (QIAGEN) and electroporations were performed at 1500 v in an electroporation cuvette (0.1 mm gap; 0.5 ml volume) containing 10 ng of DNA and 40 μl of E. coli strain ER2508 (RR1 lon:miniTn10 (Tet^{r}) (malB) (argF-lac) U169 Pro⁺ zjc::Tn5 (Kan^{r}) fhuA2) electrocompetent cells (New England Biolabs). Immediately after the pulse, 1 ml of pre-warmed (40° C.) 2×YT medium containing 2% glucose (2×YT-G) was added and the transformants were grown at 37° C. for 1 h. Cell transformants were plated onto 2×YT-AG plates and grown overnight at 37° C. Sequencing confirmed the clones contained the correct constructs.

[0390] B. Small-Scale Expression of Soluble MBP-Peptide Fusion Proteins

[0391] E. coli ER2508 (New England Biolabs) carrying the plasmids encoding MBP-peptide fusion proteins were grown in 2×YT-AG at 37° C. overnight (250 rpm). The following day the cultures were used to inoculate media (2×YT containing-G) to achieve an OD₆₀₀ of 0.1. When the cultures reached an OD₆₀₀ of 0.6, expression was induced by the addition of IPTG to a final concentration of 0.3 mM and then cells were grown for 3 h. The cells were pelleted by centrifugation and samples from total cells were analyzed by SDS-PAGE electrophoresis. The production of the correct molecular weight fusion proteins was confirmed by Western blot analysis using the monoclonal antibody anti-E-Tag-HRP conjugate (Pharmacia).

[0392] C. Large-Scale Expression of Soluble MBP-Peptide Fusion Proteins

[0393] E. coli ER2508 carrying plasmids encoding the MBP-peptide fusion proteins were grown in 2×YT-AG media for 8 h (250 rpm, 37° C.). The cultures were subcultured in 2×YT-AG to achieve an OD₆₀₀ of 0.1 and grown at 30° C. overnight. This culture was used to inoculate a fermentor with medium of following composition (g/l): glucose (3.00); (NH₄)₂SO₄ 5.00; MgSO₄.7H₂O (0.25); KH₂PO₄ (3.00); citric acid (3.00); peptone (10.00); and yeast extract (5.00); pH 6.8.

[0394] The culture was grown at 700 rpm, 37° C. until the glucose from the medium was consumed (OD_{600=˜6.0}-7.0). Expression of the fusion protein was induced by the addition of 0.3 mM IPTG and the culture was grown for 2 h in fed-batch mode fermentation with feeding by 50% glucose at a constant rate of 2 g/l/h. The cells were removed from the medium by centrifugation. Samples of the cell pellet were analyzed by SDS-PAGE followed by the Western blot analysis using the mouse monoclonal antibody anti-E-Tag-HRP conjugate (Pharmacia) to visualize the expressed product.

[0395] D. Purification

[0396] The cell pellets were disrupted mechanically by sonication or chemically by treatment with the mild detergent Triton X-100. After removal of cell debris by centrifugation, the soluble proteins were prepared for chromatographic purification by dilution or dialysis into the appropriate starting buffer. The MBP fusions were initially purified either by amylose affinity chromatography or by anion exchange chromatography. Final purification was performed using anti-E-Tag antibody affinity columns (Pharmacia). The affinity resin was equilibrated in TBS (0.025 M Tris-buffered saline, pH 7.4) and the bound protein was eluted with Elution buffer (100 mM glycine, pH 3.0). The purified proteins were analyzed for purity and integrity by SDS-PAGE and Western blot analysis according to standard protocols.

[0397] For MBP fusions, IR agonist activity was observed for the Site 1-Site 1 dimer peptides shown in Table 10, below. Additional binding data for the MBP fusions are shown in Table 11, also below.

TABLE 10

| | Mon- | | | | | | | | |
|---|---|---|---|---|---|---|---|---|---|
| | o- | | | | | | | | |
| | mer/ | | SEQ | | | | | | |
| | Lin- | | ID | | | Site | Fus. | MW | Kd |
| Fus. | ker | Sequence | NO: | Form. | Act. | IR | Conc. | (kDa) | (HIR) |
| 426 | D8 | MBP . . . | 2132 | 6 | N | 2 | 0.76 | 52.2 | 1.4 × |
| | | NNNNLGIEGRISEFIEGR AQPAMA WLDQEWAWVQCEVYGRGCPSAAA | | | | | | | 10⁻⁶ |
| | | (ETAG)AA | | | | | | | |
| 429 | D8- | MBP . . . | 2133 | 6—6 | N—N | 2—2 | 3.2 | 55.3 | 1.3 × |
| | 6aa- | NNNNLGIEGRISEFIEGRAQPAMAWLDQEWAWVQCEVYGRGCPSGGSGGS | | | | | | | 10⁻⁶ |
| | D8 | KWLDQEWAWVQCEVYGRGCPSAAA(ETAG)AA | | | | | | | |
| 430 | H2C- | MBP . . . | 2134 | 1-6 | A- | 1—1 | 0.17 | 54.5 | 2.1 × |
| | 4aa- | NNNNLGIEGRISEFIEGRDYKDDDDKFHENFYDWFVRQVSGSGSLDALDRLM | | | | | | | 10⁻⁶ |
| | RB6 | RYFEERPSLETAG | | | | | | | |
| 431 | H2C- | MBP . . . | 2135 | 1-4 | A-N | 1-2 | 3.3 | 54.8 | 4.7 × |
| | 6aa- | NNNNLGIEGRISEFIEGRDYKDDDKFHENFYDWFVRQVSGGSGGSHLCVLEE | | | | | | | 10⁻⁸ |
| | F8 | LFWGASLFGYCSGAAA(ETAG)AA | | | | | | | |
| 432 | H2C- | MBP- | 2136 | 1-4 | A-N | 1-2 | 2.9 | 55.5 | 3.5 × |
| | 12 | NNNNLGIEGRISEFIEGRDYKDDDKFHENFYDWFVRQVSGGSGGSGGSGGS | | | | | | | 10⁻⁸ |
| | aa- | HLCVLEELFWGASLFGYCSGAAA(ETAG)AA | | | | | | | |
| | F8 | | | | | | | | |
| 433 | H2C- | MBP . . . | 2137 | 1-4 | A-N | 1-2 | 2.8 | 55.2 | 2.1 × |
| | 9aa- | NNNNLGIEGRISEFIEGRDYKDDDKFHENFYDWFVRQVSGGSGGSGGSHLC | | | | | | | 10⁻⁸ |
| | F8 | VLEELFWGASLFGYCSGAAA(ETAG)AA | | | | | | | |
| 434 | G3- | MBP . . . | 2138 | 1—1 | N—N | 1—1 | 0.01 | 56 | 3.2 × |
| | 12 | NNNNLGIEGRISEFIEVRAQPAMARGGGTFYEWFESALRKHGAGGGSGGSG | | | | | | | 10⁻⁶ |
| | aa- | GSGGSRGGGTFYEWFESALRKHGAGAAA(ETAG)AA | | | | | | | |
| | G3 | | | | | | | | |
| 436 | H2C- | MBP . . . | 2139 | 1—1 | A | 1—1 | 1.1 | 54.2 | 4.1 × |
| | 9aa- | NNNNLGIEGRISEFIEGRAQPAMAFHENFYDWFVRQVSGGSGGSGGSFHEN | | | | | | | 10⁻⁷ |
| | H2C | FYDWFVRQVSAAA(ETAG)AA | | | | | | | |
| 437 | H2C | MBP . . . | 2140 | 1 | N—N | 1 | 0.3 | 51.5 | 8.3 × |
| | | NNNNLGIEGRISEFIEGRAQPAMA FHENFYDWFVRQVSAAA(ETAG)AA | | | | | | | 10⁻⁶ |
| 427 | G3- | MBP . . . | 2141 | 1—1 | N—N | 1—1 | 0.02 | 55.3 | 3.3 × |
| | 6aa- | NNNNLGIEGRISEFIEGRAQPAMARGGGTFYEWFESTLRKHGAGGGSGGSR | | | | | | | 10⁻⁶ |
| | G3 | GGGTFYEWFESALRKHGAGAAA(ETAG)AA | | | | | | | |
| 435 | H2C- | MBP . . . | 2142 | 1-1-1 | A-A- | 1-1- | 2.1 | 55.5 | 2.0 × |
| | 3aa- | NNNNLGIEGRISEFIEGRAQPAMAFHENFYDWFVRQVSGGSFHENFYDWFV | | | A | 1 | | | 10⁻⁶ |
| | H2C- | RQVSGGSFHENFYDWFVRQVSAAA(ETAG)AA | | | | | | | |
| | 3aa- | | | | | | | | |
| | H2C | | | | | | | | |
| 439 | H2C- | MBP . . . | 2143 | 1—1 | A—A | 1—1 | 1.4 | 53.9 | 5.5 × |
| | 6aa- | NNNNLGIEGRISEFIEGRAQPAMAFHENFYDWFVRQVSGGSGGSFHEN | | | | | | | 10⁻⁷ |
| | H2C | FYDWFVRQVS(ETAG)AA | | | | | | | |
| 449 | H2C- | MBP . . . | 2144 | 1—1 | | 1—1 | 1.5 | 51.8 | 6.2 × |
| | 12 | NNNNLGIEGRISEFIEGRAQPAMAFHENFYDWFVRQVSGGSGGSGGSGGSA | | | | | | | 10⁻⁷ |
| | aa- | QPAMAFHENFYDWFVRQVSAAA(ETAG)AA | | | | | | | |
| | H2C | | | | | | | | |
| 452 | G3 | MBP . . . | 2145 | 1 | | 1 | 0.15 | 48.8 | 7.8 × |
| | | NNNNLGIEGRISEFIEGRAQPAMARGGGTFYEWFESALRKHGAGAA | | | | | | | 10⁻⁷ |
| | | A(ETAG)AA | | | | | | | |
| 463 | H2C- | MBP . . . | 2146 | 1—1 | A—A | 1—1 | 1.8 | 50.1 | 9.6 × |
| | 3aa- | NNNNLGIEGRISEFIEGRAQPAMAFHENFYDWFVRQVSGGSFHENFYDWFV | | | | | | | 10⁻⁷ |
| | H2C | RQVSAAA(ETAG)AA | | | | | | | |
| 464 | LF- | MBP . . . | 2147 | 1 | | 1 | 0.045 | 48.4 | 3.9 × |
| | H2C | NNNNLGIEGRISEFIEGRDYKDDDDK FHENFYDWFVRQVSAA(ETAG)AA | | | | | | | 10⁻⁸ |
| 446 | LF- | MBP . . . | 2148 | 1 | | 2 | 1.9 | 49.1 | 7.7 × |
| | F8 | NNNNLGIEGRISEFIEGRDYKDDDDKHLCVLEELFWGASLFGYCSGAAA | | | | | | | 10⁻⁷ |
| | | (ETAG)AA | | | | | | | |
| 459 | SF- | MBP . . . | 2149 | 3 | | 1 | 0.069 | 48.1 | 7.7 × |
| | RB6 | NNNNLGIEGRISEFGSADYKDLDALDRLMRYFEERPSLAAA(ETAG)AA | | | | | | | 10⁻⁸ |
| MB | IacZ | ** | | na | | | 5.1 | 50 | >1 × |
| P* | | | | | | | | | 10⁻⁵ |

*MBP (negative control for the fusions) is fused to a small fragment of beta-galactosidase (lacZ);
**MBP-lacZ fusion protein was derived from the plasmid pMal-c2 as purchased form NEB.
Fus. = fusion; Act. = activity: Conc. = concentration; N = Antagonist; A = Agonist; LF = Long FLAG ® epitope(DYKDDDDK: SEQ ID NO: 1777); SF = Short FLAG ® epitope (DYKD; SEQ ID NO: 1545); na = not applicable; Form. = formula; All dimers are linked C-N; Linker sequences are underlined.

[0398] TABLE 11

| | Mon- | | | | | | |
|---|---|---|---|---|---|---|---|
| | o- | | | | | High | |
| | mer/ | | SEQ | | | conc. | Kd |
| Fu- | Lin- | | ID | | Site | tested | (HIR) |
| sion | ker | Sequence | NO: | Form. | IR | (μM) | μM |
| 431− | H2C- | MBP . . . | 2150 | 1-6 | 1-2 | 0.2 | 0.033 |
| | 6aa- | NNNNLGIEGRISEFIEGRDYKDDDKFHENFYDWFVRQVSGGSGGSHLCVLEELFWGASLFGYC | | | | | |
| | F8 | SGAAA(ETAG)AA | | | | | |
| 431+ | H2C- | DYKDDDKFHENFYDWFVRQVSGGSGGSHLCVLEELFWGASLFGYCSGAAA(ETAG)AA | 2151 | 1-6 | 1-2 | 0.2 | 0.0074 |
| | 6aa- | | | | | | |
| | F8 | | | | | | |
| 432− | H2C- | MBP . . . | 2152 | 1-6 | 1-2 | 0.2 | 0.02 |
| | 12 | NNNNLGIEGRISEFIEGRDYKDDDKFHENFYDWFVRQVSGGSGGSGGSGGSHLCVLEELFWGA | | | | | |
| | aa- | SLFGYCSGAAA(ETAG)AA | | | | | |
| | F8 | | | | | | |
| 432+ | H2C- | DYKDDDKFHENFYDWFVRQVSGGSGGSGGSGGSHLCVLEELFWGASLFGYCSGAAA(ETAG) | 2153 | 1-6 | 1-2 | 0.2 | 0.0038 |
| | 12 | AA | | | | | |
| | aa- | | | | | | |
| | F8 | | | | | | |
| 433− | H2C- | MBP . . . | 2154 | 1-6 | 1-2 | 0.2 | 0.03 |
| | 9aa- | NNNNLGIEGRISEFIEGRDYKDDDKFHENFYDWFVRQVSGGSGGSGGSHLCVLEELFWGASLF | | | | | |
| | F8 | G | | | | | |
| 433+ | H2C- | DYKDDDK FHENFYDWFVRQVSGGSGGSGGS HLCVLEELFWGASLFGYCSGAAA(ETAG)AA | 2155 | 1-6 | 1-2 | 0.2 | 0.004 |
| | 9aa- | | | | | | |
| | F8 | | | | | | |
| The concentrations of these fusions vary depending on the expression quality. There are 2 sets of each fusion: uncleaved (−) and cleaved with factor Xa (+). The fusion proteins are in Tris buffer (20 mM Tris, 200 mM NaCl, 1 mM EDTA, 50 mM maltose, pH 7.5) and the cleaved fusions (+) are in the same Tris buffer (500 μl) + 12 μg Factor Xa. (Source of Factor Xa: New England Biolabs). | | | | | | | |
| #Conc. = concentration: Form. = formula; All dimers are linked C-N; Linker sequences are underlined. | | | | | | | |

[0399] E. BIAcore Analysis

[0400] For BIAcore analysis of fusion protein and synthetic peptide binding to insulin receptor, insulin (50 μg/ml in 10 mM sodium acetate buffer pH 5) was immobilized on the CM5 sensor chip (Flowcell-2) by amine coupling. Flowcell-1 was used for background binding to correct for any non-specific binding. Insulin receptor (450 nM) was injected into the flow cell and the binding of IR to insulin was measured in resonance units (RUs). Receptor bound to insulin gave a reading of 220 RU. The surface was regenerated with 25 mM NaOH. Pre-incubation of receptor with insulin in a tube at RT completely abrogated the response units to 16 RU. Thus, the system was validated for competition studies. Several maltose-binding fusion proteins, peptides, and rVabs were pre-incubated with insulin receptor before injecting over the insulin chip for competition studies. The decrease in binding/resonance units indicates that several MBP-fusion proteins can block the insulin-binding site. The results are shown in Tables 12 and 13. The amino acid sequences referred to in the tables are identified in FIGS. 8 and 9A-9B, except the 447 and 2A9 sequences, which are shown below.

TABLE 12
BIAcore Results-Fusion Proteins Compete for Binding to IR

| | | Result | |
|---|---|---|---|
| | Incubation Mixtures | (RUs) | Sequence Type |
| Controls | Insulin Receptor | 220 | Positive Control |
| | (IR) 450 nM | | |
| | Insulin (8.7 μM) | 16 | Negative Control |
| MBP Fus. | A7 (20A4)-MBP | 43 | Formula 6 Motif |
| Prots. | (4.1 μM) + IR | | |
| | D8-MBP | 56 | Formula 6 Motif |
| | (1.6 μM) + IR | | |
| | D10-MBP | 81 | Formula 11 Motif |
| | (3.4 μM) + IR | | |
| | 447-MBP | 195 | hGH Pept. Fus. |
| | (11.5 μM) + IR | | |
| | MBP | 209 | Negative Control |
| | (13 μM) + IR | | |

[0401] The A7 (20A4), D8, and D10 peptide sequence are shown in FIGS. 8 and 9A-9B. The 447 peptide sequence is: LCQRLGVGWPGWLSGWCA (SEQ ID NO:2156).

TABLE 13
BIAcore Results -- Synthetic peptides compete for binding to IR

| | | Result | |
|---|---|---|---|
| Incubation Mix | % Binding | (RUs) | Sequence Type |
| IR | 100 | 128 | Positive control |
| IR + 20D1 | 41 | 51.8 | Formula 1 Motif |
| IR + D8 | 33 | 41.6 | Formula 6 Motif |
| IR + 20C11 | 38 | 49 | Formula 2 Motif (bkg high) |
| IR + H2 | 27 | 34.6 | IGF (phosphorylated band) |
| IR + 2A9 | 100 | 128 | IGF(bkg high) |
| IR + 20A4 | 33 | 41.8 | Formula 6 Motif |
| IR + p53wt | 97 | 124.5 | P53 wild type |

The concentration of each peptide was about 40 μM and the concentration of IR was 450 nM. The 20D1, 20A4, and D8 peptide sequences are shown in FIGS. 8 and 9A-9B. The remaining peptide sequences are as follows: 447 = LCQRLGVGWPGWLSGWCA (SEQ ID NO: 2156); 2A9 = LCQSWGVRIGWLTGLCP (SEQ ID NO: 2157); 20C11 = DRAFYNGLRDLVGAVYGAWD (SEQ ID NO: 1659); H2 = VTFTSAVFHENFYDWFVRQVS (SEQ ID NO: 1784).

[0402] Regarding preparation of a Site 1 agonist comprising two D117 (H2C) peptides, a linker of only 3 amino acids (12 Å) provided a ligand of greater affinity for Site 1 of IR than a corresponding ligand prepared with a 9 amino acid (36 Å) linking region (FIG. 29).

[0403] F. Stimulation of Autophosphorylation of IR by MBP-Fusion Peptides

[0404] MBP fusion peptides were prepared as described above, and then assayed for autophosphorylation of a insulin receptor construct transfected into 32D cells (Wang et al., 1993; clone 969) (see Example, above). The results of these experiments shown in FIG. 30 indicate that the H2C monomer and H2C-H2C homodimer peptides stimulate autophosphorylation of IR in vivo. H2C dimer peptides (Site 1-Site 1) with a 6 amino acid linker (H2C-6aa-H2C) were most active in the autophosphorylation assay. Other active dimer peptides are also shown in FIG. 30, particularly H2C-9aa-H2C, H2C-12aa-H2C, H2C-3aa-H2C, and F8.

[0405] G. Insulin Receptor Binding Affinity and Fat Cell Potency of MBP-Fusion Peptides

[0406] Results of assays to determine binding affinity for insulin receptor and fat cell potency of the MBP-fusion peptides are shown in Table 14, below.

TABLE 14

| | SEQ | | | | | |
|---|---|---|---|---|---|---|
| Pep- | ID | Form- | Site | | HIR Kd | |
| tide | NO: | ula | IR | Sequence | (mol/l) | FF |
| RB426 | 2158 | F6 | 2 | MBP . . . | 1.4*10⁻⁶ | |
| | | | | NNNNLGIEGRISEFIEGR AQPAMA WLDQEWAWVQCEVYGRGCPS AAA(ETAG)AA | | |
| RB429 | 2159 | F6—F6 | 2—2 | MBP . . . | 1.3*10⁻⁶ | |
| | | | | NNNNLGIEGRISEFIEGRAQPAMAWLDQEWAWVQCEVYGRGCPSGGSGGSKWLDQEWAWVQCEVYGR | | |
| | | | | GCPSAAA(ETAG)AA | | |
| RB505M | 2160 | F4 | 2 | MBP . . . | | |
| | | | | NNNNLGIEGRISEFIEGRDYKDDDDK HLCVLEELFWGASLFGYCSGAAA(ETAG)AA | | |
| RB517M | 2161 | F4—F4 | 2—2 | MBP . . . | | |
| | | | | NNNNLGIEGRISEFIEGRDYKDDDDK HLCVLEELFWGASLFGYCSGGGSGGS | | |
| | | | | HLCVLEELFWGASLFGYCSGAAA(ETAG)AA | | |
| RB515 | 2162 | F4—F4 | 2—2 | MBP . . . | | |
| | | | | NNNNLGIEGRISEFIEGRDYKDDDDK HLCVLEELFWGASLFGYCSGGGSGGSGGSGGS | | |
| | | | | HLCVLEELFWGASLFGYCSGAAA(ETAG)AA | | |
| RB510 | 2163 | F4-F4- | 2-2- | MBP . . . | | |
| | | F4 | 2 | NNNNLGIEGRISEFIEGRDYKDDDDK HLCVLEELFWGASLFGYCSGGGSGGS | | |
| | | | | HLCVLEELFWGASLFGYCSGGGSGGS | | |
| | | | | HLCVLEELFWGASLFGYCSGAAA(ETAG)AA | | |
| RB437 | 2164 | F1 | 1 | MBP . . . NNNNLGIEGRISEFIEGRAQPAMA FHENFYDWFVRQVSAAA(ETAG)AA | 8.3*10-6 | |
| RB463 | 2165 | F1—F1 | 1—1 | MBP . . . | 9.6*10⁻⁷ | |
| | | | | NNNNLGIEGRISEFIEGRAQPAMAFHENFYDWFVRQVSGGSFHENFYDWFVRQVSAAA(ETAG)AA | | |
| RB439 | 2166 | F1—F1 | 1—1 | MBP . . . | 5.5*10⁻⁷ | |
| | | | | NNNNLGIEGRISEFIEGRAQPAMA FHENFYDWFVRQVSGGSGGSFHENFYDWFVRQVS-ETAG | | |
| RB436 | 2167 | F1—F1 | 1—1 | MBP . . . | 4.1*10⁻⁷ | |
| | | | | NNNNLGIEGRISEFIEGRAQPAMAFHENFYDWFVRQVSGGSGGSGGSFHENFYDWFVRQVSAAA | | |
| | | | | (ETAG)AA | | |
| RB449 | 2168 | F1—F1 | 1—1 | MBP . . . NNNNLGIEGRISEFIEGR | 6.2*10⁻⁷ | |
| | | | | AQPAMAFHENFYDWFVRQVSGGSGGSGGSGGS AQPAMAFHENFYDWFVRQVSAAA(ETAG)AA | | |
| RB435 | 2169 | F1-F1- | 1-1- | MBP . . . | 2.0*10⁻⁶ | |
| | | F1 | 1 | NNNNLGIEGRISEFIEGRAQPAMAFHENFYDWFVRQVSGGSFHENFYDWFVRQVSGGSFHENFYDWF | | |
| | | | | VRQVSAAA(ETAG)AA | | |
| RB502 | 2170 | F1 | 1 | MBP . . . NNNNLGIEGRISEFIEGRDYKDDDDK | | |
| | | | | VRVDWLQRNANFYDWFVAELVAAA(ETAG)AA | | |
| RB508M | 2171 | F1—F1 | 1—1 | MBP . . . | | |
| | | | | NNNNLGIEGRISEFIEGRDYKDDDDKVRVDWLQRNANFYDWFVAELGGGSGGSGRVDWLQRNANFYD | | |
| | | | | WFVAELGAAA(ETAG)A | | |
| | | | | A | | |
| RB509M | 2172 | F1—F1 | 1—1 | MBP . . . | | |
| | | | | NNNNLGIEGRISEFIEGRDYKDDDDKVRVDWLQRNANFYAWFVAELGGGSGGSGGSGGSGRVDWLQR | | |
| | | | | NANFYDWFVAELGAA | | |
| | | | | A(ETAG)AA | | |
| RB452 | 2173 | F1 | 1 | MBP . . . NNNNLGIEGRISEFIEGRAQPAMARGGGTFYEWFESALRKHGAGAAA(ETAG)AA | 7.8*10⁻⁷ | |
| RB427 | 2174 | F1—F1 | 1—1 | MBP . . . | 3.3*10⁻⁶ | |
| | | | | NNNNLGIEGRISEFIEGRAQPAMARGGGTFYEWFESTLRKHGAGGGSGGSRGGGTFYEWFESALRKH | | |
| | | | | GAGAAA(ETAG)AA | | |
| RB434 | 2175 | F1—F1 | 1—1 | MBP . . . NNNNLGIEGRISEFIEVRAQPAMA | 3.2*10⁻⁶ | |
| | | | | RGGGTFYEWFESALRKHGAGGGSGGSGGSGGSRGGGTFYEWFESALRKHGAGAAA(ETAG)AA | | |
| RB513 | 2176 | F1 | 1 | MBP . . . NNNNLGIEGRISEFIEGRDYKDDDDKGSLDESFYDWFERQLGKKAA(ETAG)AA | | |
| RB516 | 2177 | F1—F1 | 1—1 | MBP . . . | | |
| | | | | NNNNLGIEGRISEFIEGRDYKDDDDKGSLDESFYDWFERQLGKKGGSGGSGSLDESFYDWFERQLGK | | |
| | | | | KAAA(ETAG)AA | | |
| RB512 | 2178 | F1—F1 | 1—1 | MBP . . . | | |
| | | | | NNNNLGIEGRISEFIEGRDYKDDDDKGSLDESFYDWFERQLGKKGGSGGSGGSGGSGSLDESFYDWF | | |
| | | | | ERQLGKKAAA(ETAG)AA | | |
| RB464 | 2179 | F1 | 1 | MBP . . . NNNNLGIEGRISEFIEGRDYKDDDDK FHENFYDWFVRQVSAA(ETAG)AA | 3.8*10⁻¹⁸ | |
| RB446 | 2180 | F4 | 2 | MBP . . . NNNNLGIEGRISEFIEGRDYKDDDDKHLCVLEELFWGASLFGYCSGAAA(ETAG)AA | 7.7*10⁻⁷ | |
| RB459 | 2181 | F3 | 1 | MBP . . . NNNNLGIEGRISEFGSADYKDLDALDRLMRYFEERPSLAAA(ETAG)AA | 7.7*10⁻⁸ | |
| RB430 | 2182 | F1-F3 | 1—1 | MBP . . . NNNNLGIEGRISEFIEGRDYKDDDDKFHENFYDWFVRQVSGGSGGS | 2.1*10⁻⁶ | − |
| | | | | LDALDRLMRYFEERPSLETAG | | |
| RB430 | 2183 | F1-F3 | 1—1 | cleaved DYKDDDKFHENFYDWFVRQVSGSGSLDALDRLMRYFEERPSLAAA(ETAG)AA | ˜4*10⁻⁹ | |
| RB431 | 2184 | F1-F4 | 1-2 | MBP . . . NNNNLGIEGRISEFIEGRDYKDDDKFHENFYDWFVRQVSGGSGGS | 4.710⁻⁸ | − |
| | | | | HLCVLEELFWGASLFGYCSGAAA(ETAG)AA | | |
| RB431 | 2185 | F1-F4 | 1-2 | cleaved DYKDDDKFHENFYDWFVRQVSGGSGGSHLCVLEELFWGASLFGYCSGAAA(ETAG)AA | ˜8*10⁻⁹ | |
| RB432 | 2186 | F1-F4 | 1-2 | MBP-NNNNLGIEGRISEFIEGRDYKDDDKFHENFYDWFVRQVSGGSGGSGGSGGS | 3.5*10⁻⁸ | − |
| | | | | HLCVLEELFWGASLFGYCSGAAA(ETAG)AA | | |
| RB432 | 2187 | F1-F4 | 1-2 | cleaved | ˜6*10⁻⁹ | |
| | | | | DYKDDDKFHENFYDWFVRQVSGGSGGSGGSGGSHLCVLEELFWGASLFGYCSGAAA(ETAG)AA | | |
| RB433 | 2188 | F1-F4 | 1-2 | MBP . . . NNNNLGIEGRISEFIEGRDYKDDDK | 2.1*10⁻⁸ | |
| | | | | FHENFYDWFVRQVSGGSGGSGGS HLCVLEELFWGASLFGYCSGAAA(ETAG)AA | 1.5*10⁻⁷ | ++ |
| RB508 | 2189 | F1—F1 | 1—1 | DYKDDDDKVRVDWLQRNANFYDWFVAELGGGSGGSGRVDWLQRNANFYDWFVAELGAAAGAPVPYPD | | |
| | | | | PLEPRSA | | |
| RB509 | 2190 | F1—F1 | 1—1 | DYKDDDDKVRVDWLQRNANFYAWFVAELGGGSGGSGGSGGSGRVDWLQRNANFYDWFVAELGAAAGA | 5.5*10⁻⁸ | ++ |
| | | | | PVPYPDPLEPRAA | | |
| RB505 | 2191 | F4 | 2 | DYKDDDDKHLCVLEELFWGASLFGYCSGAAA(ETAG)AA | 4.8*10⁻⁷ | − |
| RB517 | 2192 | F4—F4 | 2—2 | DYKDDDDKHLCVLEELFWGASLFGYCSGGGSGGSHLCVLEELFWGASLFGYCSGAAA(ETAG)AA | 6.0*10⁻⁶ | − |
| RB521 | 2193 | F1—F1 | 1—1 | MADYKDDDDKGSLDESFYDWFERQLGKKGGSGGSGSLDESFYDWFERQLGKKAAA(ETAG)PG | 4.4*10⁻⁸ | ++ |
| RB535 | 2194 | F1—F1 | 1—1 | MADYKDDDDKGSLDESFYDWFERQLGKKGGSGGSGGSGGSGSLDESFYDWFERQLGKKKAAA | ˜1.0*10⁻⁷ | ++ |
| | | | | (ETAG)PG | | |
| RB540 | 2195 | F6 | 2 | MADYKDDDDKWLDQEWAWVQCEVYGRGCPSAAA(ETAG)PG | ˜1.0*10⁻⁷ | |
| RB539 | 2196 | F6-F1 | 2-1 | MADYKDDDDKWLDQEWAWVQCEVYGRGCPSGGSGGSGSLDESFYDWFERQLGKKAAA(ETAG)PG | 7*10⁻¹⁰ | ++ |
| RB537 | 2197 | F1-F6 | 1-2 | MADYKDDDDKGSLDESFYDWFERQLGKKGGSGGSWLDQEWAWVQCEVYGRGCPSPAA(ETAG)PG | 5.9*10⁻¹¹ | − |
| RB538 | 2198 | F1-F6 | 1-2 | MADYKDDDDKGSLDESFYDWFERQLGKKGGSGGSGGSGGSWLDQEWAWVQCEVYGRGCPSAAA | 1.7*10⁻¹¹ | − |
| | | | | (ETAG)PG | | |
| RB626 | 2199 | F6-F1 | 2-1 | MADYKDEIEAEWGRVRCLVYGRCVGGGGSGGSGGSGGSGSLDESFYDWFERQLGKKAAA(ETAG)PG | 3.0*10⁻¹⁰ | ++ |
| RB625 | 2200 | F6-F1 | 2-1 | MADYKDDDDKWLDQEWAWVQCEVYGRGCPSQPPPPDITTHRADPQGSLDESFYDWFERQLGKKAAA | 3.8*10⁻¹⁰ | ++ |
| | | | | (ETAG)PG | | |
| RB622 | 2201 | F6-F1 | 2-1 | | 1.0*10⁻⁹ | ++ |

MADYKDDDDKWLDQEWAWVQCEWGRGCPSTPKPPTPPPLSADGSLDESFYDWFERQLGKKAAA(ETAG)
PG

| | | | | | | |
|---|---|---|---|---|---|---|
| RB596 | 2202 | F1 | 1 | MQNDDGSLDESFYDWFERQLGHHHHHHPG | | 9.4*10⁻⁸ |
| RB569 | 2203 | F1 | 1 | MGSLDESFYDWFERQLGEEEGGDHHHHHHPG | 2.1*10⁻⁷ | |
| RB570 | 2204 | F1 | 1 | MQNDDGSLDESFYDWFERQLGEEEGGDHHHHHHPG | 2.5*10⁻⁸ | |

ETAG = GAPVPYPDPLEPR(SEQ ID NO: 2205); MBP. . . NNNNL = fusion junction to MBP at c-terminus of MBP; All dimers are linked C-N.

### Example 9

### In Vivo Assays for Insulin Agonists

[0407] To test the in vivo activity of dimer peptide S519, an intravenous blood glucose test was carried out on Wistar rats. Male Mol:Wistar rats, weighing about 300 g, were divided into two groups. A 10 μl sample of blood was taken from the tail vein for determination of blood glucose concentration. The rats were anaesthetized with Hypnorm/Dormicum at t=−30 min and blood glucose was measured again at t=−20 min and at t=0 min. After the t=0 sample was taken, the rats were injected into the tail vein with vehicle or test substance in an isotonic aqueous buffer at a concentration corresponding to a 1 ml/kg volume of injection. Blood glucose was measured at times 10, 20, 30, 40, 60, 80, 120, and 180 min. The Hypnorm/Dormicum administration was repeated at 20 min intervals. Results shown in FIG. 33 demonstrate that the S519 (at 20 nmol/kg) peptide lowered blood glucose levels similar to levels observed for human insulin (at 2.5 nmol/kg) (n=8). The S519 peptide and human insulin showed comparable in vivo effects, both in magnitude and onset of response (FIG. 33).

### Example 10

### IGF-1 Binding Peptides

[0408] Three major groups of peptide IGF-1-binding peptides were obtained from IGF-1R panning experiments: Site 1 A6 (FyxWF) (SEQ ID NO:1596); Site 1 B6 (FyxxLxxL) (SEQ ID NO:1732), and Site 2 (cysteine loops). See Beasley et al. International Application PCT/US00/08528, filed Mar. 29, 2000, and Beasley et al., U.S. application Ser. No. 09/538,038, filed Mar. 29, 2000. Active peptides included 20E2 and RP6 (B6-like; Formula 2), S175 (A6-like; Formula 1), G33 (A6-like; Formula 1), RP9 (A6-like; Formula 1), D815 (Site 2), and D8B12 (Site 2) peptides. The IGF-1 binding peptides were analyzed by various assays, described as follows.

[0409] A. Phage Competition

[0410] Phage competition studies were performed with Site 1 (RP9) and Site 2 (D815) monomer peptides. Plates were coated with IGF-1R (100 ng/well in carbonate buffer, pH 9.6) overnight at 4° C. Wells were blocked with 4% non-fat milk in PBS for 60 min at room temperature. One hundred microliters of rescued phage were added to each well. Peptides in varying concentrations were added and the mixtures were incubated for 2 h at room temperature. Plates were washed three times with PBS and 100 μl of anti-M13 antibody conjugated to horseradish peroxidase was added to each well. The labeled antibody was incubated at room temperature for 60 min. After washing, 100 μl of ABTS was added per well and the plates read in a microtiter reader at 450 nM.

[0411] Phage included RP9 (A6-like; Formula 1); RP6 (B6-like; Formula 2); D8B12 (Site 2); and D815 (Site 2). Peptides included RP9 and D815.

| | | | | SEQ |
|---|---|---|---|---|
| Pep- | Form- | Site | | ID |
| tide | ula | IGF-1R | Sequence | NO: |
| D8B12 | 6 | 2 | WLEQERAWIWCEIQGSGCRA | 1884 |
| D815 | 6 | 2 | WLDQERAWLWCEISGRGCLS | 2206 |
| RP6 | 2 | 1 | TFYSCLASLLTGTPQPNRGPWERCR | 1635 |
| RP9 | 1 | 1 | GSLDESFYDWFERQLG | 1559 |

[0412] Results shown in FIGS. 34A-34E demonstrate that that RP9 and D815 peptides competed both Site 1 and Site 2 phage. These results illustrate the allosteric nature of the interaction with IGF-1R.

[0413] Phage competition studies were also performed with Site 2-Site 1 dimer peptides containing 6- or 12-amino acid linkers. Plates were coated with IGF-1R (100 ng/well in carbonate buffer, pH 9.6) overnight at 4° C. Wells were blocked with 4% non-fat milk in PBS for 60 min at room temperature. One hundred microliters of rescued phage were added to each well. Peptides in varying concentrations were added and the mixture incubated for 2 h at room temperature. Plates were washed three times with PBS and 100 μl of anti-M13 antibody conjugated to horseradish peroxidase was added to each well. The labeled antibody was incubated for 60 min at room temperature. After washing, 100 μl of ABTS was added per well and the plates read in a microtiter reader at 450 nM. Phage included RP9, RP6, D8B12, and D815. Peptides included D815-6L-RP9 and D815-12L-RP9. Linker sequences are underlined and shown below.

| | | Site | | SEQ ID |
|---|---|---|---|---|
| Peptide | Formula | IGF-1R | Sequence | NO: |
| D815-6L- | 6-1 | 2-1 | LDQERAWLWCEISGRGCLSGGSGGSGSLDESFYDWFERQLGKK | 2207 |
| RP9 | | | | |
| D815- | 6-1 | 2-1 | WLDQERAWLWCEISGRGCLSGGSGGSGGSGGSGSLDESFYDW | 2208 |
| 12L-RP9 | | | FERQLGKK | |

[0414] D8B12, D815, RP6, and RP9 amino acid sequences are shown in the previous section. Results shown in FIGS. 35A-35E demonstrate that dimers competed both Site 1 and Site 2 phage. This indicates that both dimer units were active at IGF-1R.

[0415] B. IGF-1 Proliferation Assays

[0416] FDC-P2 cells expressing the IL-3 and human IGF-1R receptors were grown in RPMIk-1640 medium supplemented with 15% fetal bovine serum (FBS) and 5% WEHI conditioned medium (containing IL-3) in accordance with routine methods. Prior to an experiment, the cells were pelleted and washed two times in PBS. Following this, cells were resuspended in RPMI-1640 medium with 2% FBS and added to a 96-well plate at a concentration of 2×10⁴ cells/well in 75 μl. This was designated as the cell plate.

[0417] Peptides were suspended in PPMI-15% FBS (test medium). For the agonist assay, medium was added to rows 2-12 of a 96-well plate. The peptide was added to row 1 in 200 μl of test medium at a final concentration of 60 μM. The peptide was serially diluted (1:1) across rows 2-11. No peptide was added to row 12 (control; cells without IGF-1). For the antagonist assay, test medium containing 10 ng/ml IGF-1 (ED₅₀ test medium) was added to all wells of a 96-well plate. To row 1 was added 100 μl of peptide in ED₅₀ test medium at a concentration of 120 μM. The peptide was serially diluted (1:1) across rows 2-11. No peptide was added to row 12 (control; cells with IGF-1).

[0418] For both agonist and antagonist assays, 75 μl from the working plates was transferred to the appropriate rows in comparable cell plates. The starting peptide concentration for both agonist and antagonist assays was 30 μM. Each peptide was done in duplicate. Plates were incubated at 37° C. for 45-48 h. Ten microliters of WST-1 (Cell Proliferation Reagent, Roche cat # 1 644 807) were added to each well and the plates were read in an ELISA reader (440/700 dual wavelength) each hour for 4 h. Graphs were prepared from the raw data using Sigma Plot. Peptides included:

| Pep- | Form- | Site | | SEQ ID |
|---|---|---|---|---|
| tide | ula | IGF-1R | Sequence | NO: |
| 20E2 | 2 | 1 | DYKDFYDAIDQLVRGSARAGGTRD | 2209 |
| D815 | 6 | 2 | WLDQERAWLWCEISGRGCLS | 2206 |
| G33 | 1 | 1 | GIISQSCPESFYDWFAGQVSDPWWCW | 1600 |
| RP6 | 2 | 1 | TFYSCLASLLTGTPQPNRGPWERCR | 1635 |
| RP9 | 1 | 1 | GSLDESFYDWFERQLG | 1559 |
| S175 | 1 | 1 | GRVDWLQRNANFYDWFVAELG | 1560 |

[0419] Results of the IGF-1 proliferation assays are shown in FIGS. 36-42. FIG. 36 demonstrates that that peptides G33 (Site 1; ED₅₀˜10 μM) and D815 (Site 2; ED₅₀˜2 μM) showed agonist activity at IGF-1R, whereas peptides RP9 and RP6 showed no agonist activity. FIG. 37 demonstrates that that peptides RP6 (Site 1; ED₅₀˜1 μM) and RP9 (Site 1; ED₅₀˜7 μM) showed antagonist activity at IGF-1R, whereas peptides G33 and D815 showed no antagonist activity. FIG. 38 demonstrates that peptides S175 and 20E2 exhibited weak agonist activity at IGF-1R (ED₅₀>10 μM). FIG. 39 shows that D815-RP9 dimers with 6- or 12-amino acid linkers acted as agonists at IGF-1R. FIG. 40 shows that dimer peptide D815-6-G33 was inactive as an agonist at IGF-1R. FIG. 41 shows that monomer peptide RP6 acted as an antagonist at IGF-1R. The IGF-1 standard curve determined for FDC-P2 cells is shown in FIG. 42.

[0420] The IGF-1R data for the Site 1 and Site 2 peptides is summarized in Table 15, below.

TABLE 15

| | | | | | | | | | | | |
|---|---|---|---|---|---|---|---|---|---|---|---|
| | | | | | | | | | nM | | |
| | | | | | SEQ | | | Max | IC₅₀ | | |
| Mon./ | | Site | | | ID | nM Ki | nM ED₅₀ | Ac- | An- | Ki/ | |
| Dimer | Form. | IGF-1R | Link. | Sequence | NO: | app Kd | Growth | tion | tag. | ED50 | Class |

| | | | | | | | | | | | |
|---|---|---|---|---|---|---|---|---|---|---|---|
| IGF-1 | | | NA | | | 0.69 | 0.30 | 100 | 2 | 2.3 | A |
| rG33 | 1 | 1 | NA | GIISQSCPESFYDWFAGQVSDPWWCW | 1600 | 1450 | 500 | >50 | — | 2.9 | A |
| rD815 | 6 | 2 | NA | WLDQERAWLWCEISGRGCLS | 2206 | 4080 | 500 | >50% | — | 8.2 | A |
| RP9 | 1 | 1 | NA | GSLDESFYDWFERQLG | 1559 | 417 | — | <10% | 900 | 0.5 | N |
| D815- | 6-1 | 2-1 | 6 aa | WLDQERAWLWCEISGRGCLSGGSGGSGIISQ | 2210 | 624 | — | <10% | nd | | nd |
| G33 | | | | SCPESF | | | | | | | |
| | | | | YDWFAGQVSDPWWCW | | | | | | | |
| D815- | 6-1 | 2-1 | 6 aa | WLDQERAWLWCEISGRGCLSGGSGGSGSLDE | 2211 | 36 | 50 | >50% | >500 | 0.8 | A |
| RP9 | | | | SFYDW | | | | | | | |
| | | | | FERQLGKK | | | | | | | |
| D815- | 6-1 | 2-1 | 12 aa | WLDQERAWLWCEISGRGCLSGGSGGSGGSGG | 2212 | 3 | 10,000 | 100 | — | 0.0003 | A |
| RP9 | | | | SGSL | | | | | | | |
| | | | | DESFYDWFERQLGKK | | | | | | | |

A = agonists; N = antagonist; nd = not determined; NA = not applicable; Form. = formula; Mon. = monomer; Antag. = antagonism; Link. = linker; Linker sequences are underlined.

### Example 11

### Panning Peptide Libraries for IGF-1 Binding Proteins

[0421] A. Panning Secondary Libraries

[0422] Soluble IGF-1R (“sIGF-1R”) was obtained from R&D Systems. The soluble protein (>95% pure) included the heterotetrameric (alpha 2-beta 2) extracellular domain of IGF-1R isolated from a mouse myeloma cell line. sIGF-1R (500 ng/well) was added to an appropriate number of wells in a 96-well microtiter plate (MaxiSorp plates, NUNC) and incubated overnight at 4° C. Wells were then blocked with MPBS (PBS buffer pH 7.5 containing 2% Carnation® non-fat dry milk) at room temperature (RT) for 1 h. Eight wells were used for each round of panning for the G33 and RP6 secondary libraries. The phage were incubated with MPBS for 30 min at RT, then 100 μl was added to each well.

[0423] For the first round, the input phage titer was 4×10¹³ cfu/ml. For rounds 2 and 3, the input phage titer was approximately 10¹¹ cfu/ml. Phage were allowed to bind for 2 to 3 h at RT. The wells were then quickly washed 13 times with 200 μl/well of MPBS. Bound phage were eluted by incubation with 100 μl/well of 20 mM glycine-HCl, pH 2.2 for 30 s. The resulting solution was then neutralized with Tris-HCl, pH 8.0. Log phase TG1 cells were infected with the eluted phage, then plated onto two 24 cm×24 cm plates containing 2×YT-AG. The plates were incubated at 30° C. overnight. The next morning, cells were removed by scraping and stored in 10% glycerol at −80° C. For subsequent rounds of affinity enrichment, cells from these frozen stocks were grown and phage were prepared as described above. A minimum of 72 clones was picked at random from the second, third, and fourth rounds of panning and screened for binding activity. DNA sequencing of the clones determined the amino acid sequences summarized in FIG. 43A-43B.

[0424] B. Panning Peptide Dimer Libraries

[0425] Microtiter plates were coated and blocked by standard methods, as follows. Plates were coated with sIGF-1R (see Example, above) or soluble IR (Bass construct; Bass et al., 1996, J. Biol. Chem. 271:19367-19375) in 0.2 M NaHCO₃, pH 9.4. One hundred microliters of solution containing either 50 ng IR or IGF-1R (rounds 1 and 2), 25 ng IR or IGF-1R (round 3), or 12.5 ng IR or IGF-1R (round 4) was added to an appropriate number of wells in a 96-well microtiter plate (MaxiSorp plates, Nalge NUNC) and incubated overnight at 4° C. Wells were then blocked with a solution of 2% non-fat milk in PBS (MPBS) at RT for at least 1 h.

[0426] Eight wells coated with IR or IGF-1R were used for each round of panning. One hundred microliters of phage were added to each well. For the first round, the input phage titer was 3×10¹³ cfu/ml. For subsequent rounds, the input phage titer was approximately 10¹² cfu/ml. Phage were incubated for 2-3 h at RT. The wells were then quickly washed 13 times with 300 μl/well of PBS. Bound phage were eluted by incubation with 150 μl/well of 50 mM glycine-HCl, pH 2.0 for 15 min. The resulting solution was pooled and then neutralized with Tris-HCl, pH 8.0. Log phase TG1 cells were infected with the eluted phage, in 2×YT medium for 1 h at 37° C. prior to the addition of helper phage, ampicillin, and glucose (2% final concentration).

[0427] After incubation for 1 h at 37° C., the cells were spun down and resuspended in 2×YT-AK medium. The cells were then returned to the shaker and incubated overnight at 37° C. Phage amplified overnight were then precipitated and subjected to the next round of panning. A total of 96 clones were picked at random from rounds 3 and 4 and screened for binding activity. Several clones from each pan were further tested for binding to IR or IGF-1R in phage ELISA by competition with soluble peptides as described in Beasley et al. International Application PCT/US00/08528, filed Mar. 29, 2000, and Beasley et al., U.S. application Ser. No. 09/538,038, filed Mar. 29, 2000. Competition was performed by addition of 5 μl of RP9 peptide, recombinant D8 peptide, or both per well, followed by addition of 100 μl of phage per well. Representative peptides are shown in FIGS. 44A-44B and in Table 16, below.

TABLE 16

| | SEQ | | | | |
|---|---|---|---|---|---|
| | ID | | Site | | |
| Pep. | NO: | Form. | IR | Sequence | Description |
| RP27 | 2213 | 6-1 | 2-1 | GLDQEQAWVECEVYGRGCPYGSLDESFYDWFERQLG | No linker |
| RP28 | 2214 | 6-1 | 2-1 | RLEEEWAWVQCEVYGRGCPSGGSGGSGSLDESFYDWFERQLG | EEE Stretch in D8 |
| RP29 | 2215 | 6-1 | 2-1 | SLDREWACVKCEVYGRGCPCGGSGGSGSLDESFYDWFERQLG | Repeat isolate |
| RP30 | 2216 | 6-1 | 2-1 | SLEEEWAQVECEVYGRGCPSGGSGGSGSLDESFYDWFERQLG | D8 by design |
| RP31 | 2217 | 6-1 | 2-1 | SLEEEWAQVECEVYGRGCPSGGSGGSGLLDESFYHWFDRQLR | D8 & RP9 by design |
| RP32 | 2218 | 6-1 | 2-1 | SIEEEWAQIKCDVWGRGCPPGGSGGSGLLDESFYHWFDRQLR | D8 & RP9 by design |
| RP33 | 2219 | 6-1 | 2-1 | QLDLEWAWVQCEVYGRGCGGSGSLDESFYDWFERQLG | 3 amino acid linker |
| RP34 | 2220 | 6-1 | 2-1 | QLDEEWAGVQCEVYGRGCSLDESFYDWFERQLG | No linker |
| RP35 | 2221 | 6-1 | 2-1 | RLEEEWRWVQCEVYGRGCAAGGSGGSGSLDESFYDWFERQLG | EEE Stretch in D8 |
| RP36 | 2222 | 6-10 | 2-1 | SLDQEWAWVQCEVYGRGCPSGGSGGSDSDWAGYEWFEEQLD | D8 (W1->S)- Group 6 |
| | | | | | by design |

Pep. = peptide; Form. = formula; Linker sequences are shown in bold and underlined; All dimers are linked C-N

[0428] C. Determination of Amino Acid Preferences

[0429] For both monomer and dimer peptides, amino acid preferences for each peptide were determined as follows. The expected frequency of each of the 20 amino acids at that position was calculated based on codon usage and % doping for that library. This was then compared to the actual frequency of occurrence of each amino acid at every position after four rounds of biopanning. Any amino acid that occurred at a frequency >2-fold was considered preferred. Most preferred amino acid(s) were those that have the greatest fold enrichment after panning. Preferred amino acid sequences for RP9, D8, and Formula 10 (Group 6) peptides are shown below.

TABLE 17

| | | |
|---|---|---|
| Peptide | Sequence | SEQ ID NO: |

| | | |
|---|---|---|
| RP9 | GSLDESFYDWFERQLG | 1559 |
| Regular | GLADEDFYEWFERQLR | 2223 |
| | L | |
| w/Peptide | GQLDEDFYEWFDRQLS | 2224 |
| | A | |
| w/Insulin | GFMDESFYEWFERQLR | 2225 |
| | W A | |

[0430] Table 17 shows preferred amino acid sequences for RP9 peptides. Residues in bold indicate strong preference; underlined residues indicate positions where more than one amino acid preference is seen. The first column indicates the conditions used for the panning procedure. “RP9” indicates sequence of the parent RP9; “Regular” indicates regular pan as described in methods for panning of random libraries; “w/peptide” indicates panning in the presence of 2 nM RP9 peptide; “w/ insulin” indicates panning in the presence of 2 nM insulin.

TABLE 18

| | | SEQ ID |
|---|---|---|
| Peptide | Sequence | NO: |
| D8 Parent: | WLDQEWAWVQCEVYGRGCPS | 2129 |
| Dimer Consensus | sLEEEWaQIECEVY/WGRGCps | 2226 |
| Monomer Consensus | sLEEEWaQIqCEIY/WGRGCry | 1548 |
| | W | |

[0431] Table 18 shows preferred amino acid sequences for D8 peptides. Upper case residues in bold indicate strong preference (>90% frequency); upper case letters, non-bold, indicate some preference (5-15% higher frequency than expected); lower case letters indicate less preference (2-5% higher frequency than expected); similar preferences seen in D8 in both monomer and dimer libraries. The underlined Y/W indicates that both residues are equally preferred at that position. In the original D8 sequence that position is occupied by Y.

TABLE 19

| | | | SEQ ID |
|---|---|---|---|
| Peptide | Sequence | Type | NO: |
| Group 6 | W(A/E)GYEW(F/L) | preferred core | 1549 |
| Group 6 | DSDWAGYEWFEEQLD | preferred sequence | 1595 |

[0432] Table 19 shows preferred amino acid sequences for Group 6 peptides. Underlined residues indicate preferred N-terminal and C-terminal extensions.

### Example 12

### Fluorescence-Based hIGF-1R Binding Assays

[0433] A. Heterogeneous Time-Resolved Fluorometric Assays

[0434] The effect of recombinant peptide G33 (rG33) on the binding of biotinylated-recombinant human IGF-1 (b-rhIGF-1) to recombinant human IGF-1R (rhIGF-1R) was determined using heterogeneous time-resolved fluorometric assays (TRF; DELFIA®, PE Wallac, Inc.). The rhIGF-1R protein included the extracellular domain of the receptor pre-propeptide, up to amino acid residue 932 (A. Ullrich et al., 1986, EMBO J. 5:2503-2512). Duplicate data points were collected at each concentration of competitor and the lines were designed to represent the best fit to a four-parameter non-linear regression analysis (y=min+(max−min)/(1+10ˆ((logIC₅₀−x)*Hillslope))) of the data, which was used to determine IC₅₀ values.

[0435] The assay was performed using a 96-well clear microplate (NUNC MaxiSorp) with a final volume of 100 μl. Microtiter plates were coated with 0.1 μg rhIGF-1R in 100 μl of NaHCO₃, pH 8.5 buffer, and incubated overnight at room temperature (RT). The plates were washed 3-times with 0.05 M Tris-HCl (pH 8 at 25° C.), 0.138 M NaCl, 0.0027 M KCl (TBS). This was followed by addition of 200 μl blocking buffer (TBS containing 0.05% Bovine Serum Albumin (BSA, Cohn Fraction V)), and incubated for 1 h at RT. The plates were washed 6-times with a 1× solution of Wallac's DELFIA® wash concentrate. Competitor was added in a volume of 50 μl and serially diluted across the microtiter plate in TBS containing 0.05% BSA. Non-specific binding (background) was determined in the presence of 60 μM hIGF-1.

[0436] Fifty microliters of b-rhIGF-1, 10 nM, diluted in TBS containing 0.05% BSA was added. The plates were incubated for 2 h at RT. After incubation, plates were washed 6-times with a 1× solution of Wallac's DELFIA® wash concentrate. Then the plates were treated with 100 μL of Wallac's DELFIA® Assay Buffer containing a 1:1000 dilution of europium-labeled streptavidin and incubated for 2 h at RT. This was followed by washing 6-times with a 1× solution of Wallac's DELFIA® wash concentrate. One hundred microliters of Wallac's DELFIA® enhancer was added, and the plates were shaken for 30 min at RT. After shaking, the fluorescence signal at 620 nm was read on a Victor² 1420 plate reader (PE Wallac, Inc.). Primary data were background corrected, normalized to buffer controls, and then expressed as % specific binding. The Z′-factor was greater than 0.5 (Z′=1−(3σ₊+3σ₋)/|μ₊−μ₋|; Zhang et al., 1999, J. Biomol. Screen. 4:67-73) and the signal-to-background (S/B) ratio was ˜20. The results of these experiments are shown in FIG. 45. The IC₅₀ value calculated for rG33 is shown in Table 20, below.

[0437] The effect of recombinant peptides D815 (rD815), RP9, D815-6aa-G33, D815-6aa-RP9, and D815-12aa-RP9 on the binding of b-rhIGF-1 to rhIGF-1R was determined using the fluorometric assay described above. IGF-1 was used as a control. Duplicate data points were collected at each concentration of competitor and the lines represent the best fit to a four-parameter non-linear regression analysis, which was used to determine IC₅₀ values. Results for rD815 are show in FIG. 46; results for RP9 are shown in FIG. 47; results for D815-6-G33 are shown in FIG. 48; results for D815-6-RP9 are shown in FIG. 49; and results for D815-12-RP9 are shown in FIG. 50; the results for IGF-1 are shown in FIG. 51. The IC₅₀ values for the rD815, RP9, D815-6aa-G33, D815-6aa-RP9, and D815-12aa-RP9 peptides, and IGF-1 are shown in Table 20, below. Linker sequences are underlined.

TABLE 20

| Com- | | SEQ | |
|---|---|---|---|
| peti- | | ID | |
| tor | Sequence | NO: | IC₅₀(M) |
| rG33 | GIISQSCPESFYDWFAGQVSDPWWCW | 1600 | 1.45 × |
| | | | 10⁻⁶ M |
| rD815 | WLDQERAWLWCEISGRGCLS | 2206 | 4.08 × |
| | | | 10⁻⁶ M |
| RP9 | GSLDESFYDWFERQLG | 1559 | 4.17 × |
| | | | 10⁻⁷ M |
| D815- | WLDQERAWLWCEISGRGCLSGGSGGSGIIS | 2210 | 6.24 × |
| 6aa- | QSCPESFYDWFAGQVSDPWWCW | | 10^{-7 M} |
| G33 | | | |
| D815- | WLDQERAWLWCEISGRGCLSGGSGGSGSL | 2211 | 3.57 × |
| 6aa- | DESFYDWFERQLGKK | | 10⁻⁸ M |
| RP9 | | | |
| D815- | WLDQERAWLWCEISGRGCLSGGSGGSGG | 2212 | 3.22 × |
| 12aa- | SGGSGSLDESFYDWFERQLGKK | | 10⁻⁹ M |
| RP9 | | | |
| IGF-1 | | | 6.85 × |
| | | | 10⁻¹⁰ M |

[0438] The order of potency of all peptides or dimers compared to IGF-1 was determined as: IGF-1>D815-12aa-RP9>>D815-6aa-RP9>RP9 D815-6aa-G33>rG33>rD815. These results suggest that the coupling of D815 with RP9 using an extended linker (12 versus 6 amino acids) produced a potent competitor that approximates the affinity of IGF-1 for its own receptor.

[0439] B. Time-Resolved Fluorescence Resonance Energy Transfer Assays

[0440] The effect of Site 1 peptides, Site 2 peptides, and rhIGF-1 on the dissociation of biotinylated-20E2 (b-20E2, Site 1) from recombinant human IGF-1R was determined using time-resolved fluorescence resonance energy transfer assays (TR-FRET). Best fit non-linear regression analysis of the data, was used to determine dissociation rate constants. Each data point represents a single observation.

[0441] The assay was performed using a 96-well white microplate (NUNC) with a final volume of 100 μl. Final incubation conditions were 16.5 nM b-20E2, 2.2 nM SA-APC (streptavidin-allophycocyanin), 2.2 nM Eu³⁺-rhIGF-1R (LANCE™ labeled, PE Wallac, Inc.), 0.05 M Tris-HCl (pH 8 at 25° C.), 0.138 M NaCl, 0.0027 M KCl, and 0.1% BSA (Cohn Fraction V). Reactions were allowed to reach equilibrium for 6 h at RT. Following this, various peptides or IGF-1 were added at a final concentration of 100 μM or 30 μM, respectively. The addition of peptides or IGF-1 initiated the measurement of dissociation (Time Zero, sec). The fluorescence signal at 665 nm was read on a Victor² 1420 plate reader (PE Wallac, Inc.) at 30 sec intervals.

[0442] Results of these experiments are shown in FIG. 52. The buffer controls did not vary over the time interval of study, which demonstrated that the equilibrium was not disturbed by the addition of diluent at Time zero. The addition of excess (>1000-fold 20E2 K_{d} for IGF-1R) Site 1 peptides such as H2C, 20E2, or RP6 did not differ depending on specific the peptide used, and the dissociation rates of b-20E2 were similar for these peptides. D8B12 (Site 2 peptide) and IGF-1 (binds both Site 1 and Site 2) did demonstrate significant differences in the rate of dissociation of b-20E2. This would suggest that these agents act as non-competitive or allosteric regulators of Site 1 binding.

[0443] The effect of various peptides or peptide dimers on the binding of biotinylated-20E2 (B-20E2) to recombinant human IGF-1R was determined using TR-FRET assays, described above. For these experiments, each data point represents the average of two replicate wells. The lines represent the best fit to a four-parameter non-linear regression analysis (y=min+(max−min)/(1+10ˆ((logIC₅₀−x)*Hillslope))) of the data, which was used to determine IC₅₀ values.

[0444] The assays were performed using a 384-well white microplate (NUNC) with a final volume of 30 μl. Final incubation conditions were 15 nM b-20E2, 2 nM SA-APC, 2 nM Eu³⁺-rhIGF-1R (LANCE™ labeled, PE Wallac, Inc.), 0.05 M Tris-HCl (pH 8 at 25° C.), 0.138 M NaCl, 0.0027 M KCl, and 0.1% BSA (Cohn Fraction V). After 16-24 h of incubation at RT, the fluorescence signal at 665 nm and 620 nm was read on a Victor² 1420 plate reader (PE Wallac, Inc.). Primary data were background corrected, normalized to buffer controls, and then expressed as % specific binding. The Z′-factor was greater than 0.5 (Z′=1−(3σ₊+3σ₋)/|μ₊−μ₋|; Zhang et al., 1999, J. Biomol. Screen. 4:67-73) and the signal-to-background (S/B) ratio was ˜4. Results of these experiments are shown in FIG. 53. Table 21, below, shows the IC₅₀ values calculated for these experiments. Notably, the C1 peptide showed IGF-1R affinities of ˜1 nM (FIG. 53) and ˜10 nM (Table 21) in these assays.

TABLE 21

| | | | | | |
|---|---|---|---|---|---|
| | | SEQ ID | | Site | |
| Competitor | Sequence | NO: | Formula | IGF-1R | IC₅₀ (M) |

| | | | | | |
|---|---|---|---|---|---|
| C1 | CWARPCGDAANFYDWFVOQAS | 1550 | 1 | 1 | 8.80E−10 |
| IGF-1 | | | | | 2.93E−09 |
| RP9 | GSLDESFYDWFERQLG | 1559 | 1 | 1 | 3.93E−08 |
| 20E2 | DYKDFYDAIDQLVRGSARAGGTRD | 2209 | 2 | 1 | 1.04E−07 |
| E8 | GGTVWPGYEWLRNA | 2118 | 10 | 2 | 2.53E−07 |
| H2C | FHENFYDWFVQRVSKK | 2117 | 1 | 1 | 4.60E−07 |
| S173 | LDALDRLMRYFEERPSL | 1830 | 3 | 1 | 6.29E−06 |
| D8B12 | WLEQERAWIWCEIQGSGCRA | 1884 | 6 | 2 | 1.13E−05 |
| A6 | SAKNFYDWFVKK | 1551 | 1 | 1 | 3.10E−05 |

[0445] C. Fluorescence Polarization Assays

[0446] The effect of various peptide monomers and dimers on the binding of fluorescein-RP9 (FITC-RP9) to soluble human insulin receptor-immunoglobulin heavy chain chimera (sIR-Fc; Bass et al., 1996, J. Biol. Chem. 271:19367-19375) was determined using fluorescence polarization assays (FP). For these experiments, each data point represents the average of two replicate wells. The lines represent the best fit to a four-parameter non-linear regression analysis of the data, which was used to determine IC₅₀ values.

[0447] The assays were performed in a 384-well black microplate (NUNC) with a final volume of 30 μl. Final incubation conditions were 1 nM FITC-RP9, 10 nM sIR, 0.05 M Tris-HCl (pH 8 at 25° C.), 0.138 M NaCl, 0.0027 M KCl, 0.05% BGG (bovine gamma globulin), 0.005% Tween-20®. After 16-24 h of incubation at RT, the fluorescence signal at 520 nm was read on an Analyst™ AD plate reader (LJL BioSystems, Inc.). Primary data were background corrected using 10 nM sIR without FITC-RP9 addition, normalized to buffer controls and then expressed as % specific binding. The Z′-factor was greater than 0.5 (Z′=1−(3σ₊+3σ₋)/|μ₊−μ₋|; Zhang et al., 1999, J. Biomol. Screen. 4:67-73) and the assay dynamic range was ˜125 mP. In parallel with these experiments, TR-FRET assays were performed using rhIGF-1R and b-20E2, as described above. Results of the FP and TR-FRET experiments are shown in Table 22, below.

TABLE 22

| | | | | | | | |
|---|---|---|---|---|---|---|---|
| | FP | TR-FRET | Bndg Ratio | | Site | SEQ ID | |
| Peptide | sIR-Fc | rhIGF-1R | IGF-1R/IR | Form. | IGF-1R | NO: | Sequence |

| | | | | | | | |
|---|---|---|---|---|---|---|---|
| RP4 | 17 | 8100 | 476 | 2 | 1 | 1552 | PPWGARFYDAIEQLVFDNL |
| S175 | 10 | 1650 | 165 | 1 | 1 | 1560 | GRVDWLQRNANFYDWFVA |
| | | | | | | | ELG |
| RP15 | 28 | 706 | 25 | 1 | 1 | 2130 | SQAGSAFYAWFDQVLRTV |
| H2C (D117) | 66 | 600 | 9 | 1 | 1 | 2117 | FHENFYDWFVQRVSKK |
| 20E2 (D118) | 51 | 100 | 1.9 | 2 | 1 | 2209 | DYKDFYDAIDQLVRGSARA |
| | | | | | | | GGTRD |
| RP9 | 24 | 33 | 1.4 | 1 | 1 | 1559 | GSLDESFYDWFERQLG |
| G33 | 139 | 178 | 1.3 | 1 | 1 | 1600 | GIISQSCPESFYDWFAGQV |
| | | | | | | | SDPWWCW |
| E8 (D120) | 206 | 175 | 0.85 | 10 | 2 | 2118 | GGTVWPGYEWLRNA |
| C1 (D112) | 52 | 10 | 0.19 | 1 | 1 | 1550 | CWARPCGDAANFYDWFV |
| | | | | | | | QQAS |
| RP16 | 6400 | 961 | 0.15 | | | 1553 | VMDARDDPFYHKLSELVT |

FP sIR-Fc column shows IC₅₀ (nM) values obtained (vs. FITC-RP9); TR-FRET rhIGF-1R column shows IC₅₀ (nM) values obtained (vs. b-20E2); for binding ratio: higher values indicated higher affinity for IR than IGF-1R. Form. = formula; Bndg. = binding.

[0448] These results demonstrated that S175, RP4, and RP15 showed high affinities for IR and showed high binding ratios for IGF-1R over IR. H2C, 20E2, RP9, and C1 were slightly less potent than S175, RP4, and RP15 at IR, and these peptides had lower binding ratios for IGF-1R over IR. G33 and E8 were less potent than S175, RP4, and RP15 at IR, and showed comparable binding to IGF-1R and IR. RP16 had poor potency at IR and IGF-1R, but had higher affinity for IGF-1R than IR.

### Example 13

### IGF-1R Binding Peptides—Additional Isolates

[0449] The isolation and characterization of peptides which bind to and subdivide the insulin receptor binding site into multiple, non-overlapping regions designated Site 1 and Site 2 has been previously described (Beasley et al., U.S. application Ser. No. 09/538,038, filed Mar. 29, 2000, published as WO 01/72771; Pillutla et al., U.S. patent application Ser. No. 09/962,756, filed Sep. 24, 2001; Pillutla et al., 2002, J. Biol. Chem. 277:22590-22594). To identify IGF-1R antagonists, a multi-tiered approach was used. First, Site 1 peptides with greater selectivity for IGF-1R as compared to IR were identified. Second, secondary libraries were generated using information from the primary library pannings. These secondary libraries were designed to define the amino acid requirements for binding, specificity, and affinity.

[0450] To determine optimal sequence requirements within the motif, a secondary library based on a clone identified from the random library was made where the flanking regions were held constant, while the core was allowed to change. The library was prepared from doped oligonucleotides so that half of the amino acid residues (on average) in the core sequence were altered per peptide. Panning of these libraries identified substitutions within the core that did or did not affect binding. In an alternative approach, amino acids in the flanking regions conferring binding affinity and/or specificity were defined by designing secondary libraries wherein the core was held constant and the flanking sequences were either doped or randomized. For both types of libraries, amino acids optimal for binding were selected by panning against IGF-1R. Once secondary peptides with the appropriate binding characteristics were identified, a preferred peptide was defined. To do this, the amino acids at each position were optimized based on a comparison of the expected results from the doping strategy and the actual results observed in the binding population.

[0451] A. Primary Peptide Libraries

[0452] The E. coli, strain TG1 (genotype=K12Δ(lac-pro), supE, thi, hsdΔ5/F′[traD36, proAB, lacl^{q}, lacZΔM15]) was obtained from Pharmacia (Piscataway N.J.). DNA fragments coding for peptides containing 40 random amino acids were generated by a PCR-technique using synthetic oligonucleotides. A 145-base oligonucleotide was synthesized to include the sequence (NNK)₄₀ where N=A, C, T, or G and K=G or T. This oligonucleotide was used as the template in PCR reactions along with two shorter oligonucleotide primers, both of which were biotinylated at their 5′ ends. The resulting product was purified, concentrated, and ligated to the phagemid pCANTAB5E (Pharmacia). The ligation product was purified and electroporated into competent bacterial cells. The transformants were grown at 37° C. for 1 h, pooled and plated onto selection medium. Depending upon the amount of DNA electroporated, the diversity of the random 40mer peptide cell library was found to be between 1.6×10¹⁰ and 1×10¹¹ independent clones. The phage library was produced by rescue of the cell library according to standard phage preparation protocols (G. P. Smith and J. K. Scott, 1993, Methods Enzymol. 217:228-257). Phage titers were usually at 4×10¹³ cfu/ml. In previous experiments, sequencing of randomly selected clones from the cell library indicated that about 54% of all clones were in-frame. The short FLAG sequence (DYKD; SEQ ID NO:1545), was included at the N-terminus as an immunoaffinity tag. In addition, the E-tag epitope (GAPVPYPDPLEPR; SEQ ID NO:XX) was engineered into the carboxy terminus of the peptide. Additional random phage libraries of 20mer peptides were constructed using a similar approach. The diversity of these cell libraries was estimated to be >1.1×10¹¹ clones.

[0453] B. Secondary and Tertiary Libraries

[0454] The desired number of amino acid mutations were introduced in the parental peptide at the codon level when the synthetic DNA template was produced. For example, where a change in 45% of the amino acids was desired (i.e., 9 changes/20 amino acids), then a 60% change at the codon level was needed due to the redundancy of the genetic code (efficiency factor of 0.75). Per position, this translated to 20% doping at the level of DNA synthesis. At the DNA synthesis level, a 20% doping included the following ratio of nucleotides in the synthetic template:

| | | | | |
|---|---|---|---|---|
| A | 80% A, | 6.6% C, | 6.6% G, | 6.6% T |
| C | 6.6% A | 80% C, | 6.6% G, | 6.6% T |
| G | 6.6% A | 6.6% C, | 80% G, | 6.6% T |
| T | 6.6% A | 6.6% C, | 6.6% G, | 80% T |

[0455] In this chart, the A, C, T, G (underlined and in bold) bases represent the original bases in the parental sequence. When the clones from cell libraries were sequenced and the number of amino acid mutations was examined per peptide, the average number of changes was found to correlate to the desired value. After the synthetic template was obtained, the DNA was ligated to the pCANTBA5E phagemid vector to produce the cell library in the TGI strain as previously described. Phage rescue was carried out to produce the phage library used in the panning experiments.

[0456] C. Panning of Peptide Libraries

[0457] A standard method was used to coat and block all microtiter plates. Plates were coated with IGF-1R in 0.2 M NaHCO₃, pH 9.4. One hundred microliters of solution containing 100 ng of IGF-1R was added to an appropriate number of wells in a 96-well microtiter plate (MaxiSorp plates, Nunc) and incubated overnight at 4° C. Wells were then blocked with a solution of 2% non-fat milk in PBS (MPBS) at room temperature (RT) for at least 1 h.

[0458] Four to eight wells coated with IGF-1R were used for each round of panning. One hundred microliters of phage were added to each well. For the first round, the input phage titer was ˜10¹³ cfu/ml. For subsequent rounds, the input phage titer was approximately 10¹² cfu/ml. Phage were allowed to bind for 2-3 h at RT. The wells were then quickly washed 13 times with 300 μl/well of PBS. Bound phage were eluted by incubation with 150 μl/well of 50 mM glycine-HCl, pH 2.0 for 5 min. The resulting solution was pooled and then neutralized with Tris-HCl, pH 8.0.

[0459] Log phase TG1 cells were infected with the eluted phage, in 2×YT medium for 1 h at 37° C. prior to the addition of helper phage, ampicillin and glucose (2% final concentration). After incubation for another hour at 37° C., the cells were spun down and resuspended in 2×YT-AK medium. The cells were then returned to the shaker and incubated overnight at 37° C. Phage amplified overnight was then precipitated and subjected to the next round of panning. A total of 96 clones were picked at random from rounds 3 and 4 and screened for binding activity.

[0460] D. ELISA Analyses of Phage

[0461] For phage pools, cells from frozen stocks were grown and phage were prepared as described above. For analysis of individual clones, colonies were picked and phage prepared as described above. Subsequent steps were the same for pooled and clonal phage. Microtiter wells were coated and blocked as described above. Wells were coated with either IGF-1R or IR. Phage resuspended in MPBS (PBS containing 2% non-fat milk) were added to wells (100 μl/well) and incubated at room temperature for 1 h. The phage solution was then removed, and the wells were washed three times with PBS at room temperature.

[0462] Anti-M13 antibody conjugated to horseradish peroxidase (Pharmacia Biotech) was diluted 1:3000 in MPBS and added to each well (100 μl/well). Incubation was for another hour at room temperature, followed by PBS washes as described. Color was developed by addition of ABTS solution (100 μl/well; Boehringer). Color development was stopped by adjusting each well to 0.5% SDS. Plates were analyzed at 405 nm using a SpectraMax 340 plate reader (Molecular Devices) and SoftMax Pro software. Data points were averaged after subtraction of appropriate blanks. A clone was considered “positive” if the A₄₀₅ of the well was ≧2-fold over background.

[0463] E. Determination of Amino Acid Preferences

[0464] Amino acid preferences for each peptide were determined as follows. The expected frequency of each of the 20 amino acids at that position was calculated based on codon usage and % doping for that library. This was then compared to the actual frequency of occurrence of each amino acid at every position after four rounds of biopanning. Any amino acid that occurred at a frequency ≧2-fold was considered preferred. The most preferred amino acid(s) were defined as those with the greatest enrichment after panning. Using the amino acid preferences determined for each position, peptides with the most preferred sequences were designed.

[0465] Representative monomer and dimer peptides identified by panning secondary libraries for binding to IGF-1R are shown in FIGS. 54A-54B, 55A-55B, 56A-56B, 57A-57B, 58A-58B, 59A-59B, 60A-60C, 61A-61B, 62A-62B, 63A-63B, and 64A-64B. Primary library pannings produced several peptides, including RP6, RP48, RP52, RP54, RP56, and RP60, described above. Peptides designed according to amino acid preferences (i.e., peptides by design) included RP30-IGF, RP31-IGF, and RP33-IGF.

### Example 14

### IGF-1 Antagonist Peptides

[0466] A. Cells and Reagents

[0467] MCF-7 and MiaPaCa cell lines were obtained from the American Type Culture Collection (Manassas, Va.). Cells were routinely grown in RPMI1640 medium supplemented with 10% fetal bovine serum and 1% glutamax. The extra-cellular domain of IGF-1R was obtained as a recombinant protein from R&D Systems (Minneapolis, Minn.).

[0468] B. Whole-Cell Lysates

[0469] For qualitative IRS-1 phosphorylation analysis, MCF-7 cells in monolayer cultures (about 80% of confluency) were used. After about 20 h of starvation in serum-free RPMI medium (GibcoBRL), cells were stimulated for 10 min in the same medium containing IGF-1 (Peprotech), or IGF-1 plus peptides (synthetic peptides produced by Research Genetics), or no addition as a negative control. After treatment, cells were rinsed twice with ice-cold PBS containing 0.2 mM PMSF and 1 mM Na₃VO₄ (all from SIGMA). Cells were scraped into the same buffer and pelleted by centrifugation at 200×g for 3 min. Lysis was done in RIPA buffer (0.8766% NaCl, 0.11% SDS, 0.5% deoxycholic acid (all from SIGMA), 1% Triton X-100, (Boehringer Mannheim)) containing phosphatase inhibitor cocktails 1 and 2 (SIGMA) and protease cocktail inhibitor tablet (Boehringer Mannheim) for 5 min on ice. Cell lysates were cleared by centrifugation for 5 min at 14 000×g and the resulting supernatant was snap-frozen in ethanol-dry ice and stored at −80° C. The protein concentration was determined using the Dc Protein Assay Kit (Bio-Rad Laboratories).

[0470] C. Immunoprecipitation and Western Blot Analysis

[0471] Immunoprecipitations were performed with pre-cleared lysates for 4 h at 400 C using 0.3-0.5 mg total protein with 1 μg polyclonal anti-IRS-1 antibody (Upstate Biotechnology), and 25 μl protein A/agarose slurry (SIGMA). Agarose beads with immobilized proteins were washed 3 times with IP wash buffer (50 mM Tris pH 7.5 (GibcoBRL), 150 mM NaCl, 1 mM Na₃VO₄, 0.2 mM PMSF). Protein elutions and denaturation were done for 3 min at 950 C in 30 μl of Laemmle sample buffer (Bio-Rad Laboratories) with 0.5 M β-mercaptoethanol (SIGMA).

[0472] Immunoprecipitates were subjected to SDS-PAGE on 4-15% Tris-HCl Ready Gels and transferred to Trans-Blot Transfer Medium nitrocellulose membranes (both from Bio-Rad Laboratories). Membranes were blocked with PBS-Tween 20 (SIGMA) containing 2% non-fat milk. For detection of IRS-1 protein, blots were incubated with anti-IRS-1 antibody, followed by secondary antibody goat anti-rabbit IgG, HRP-conjugate. For detection of phosphorylated IRS-1, blots were incubated with monoclonal anti-phosphotyrosine (4G10) HRP-conjugated antibody. All antibodies were obtained from Upstate Biotechnology. Blots were exposed to an enhanced chemifluorescence substrate (ECL Western Blotting Analysis System, Amersham Pharmacia Biotech). Films were developed and fluorescent signal was visualized for qualitative analysis.

[0473] D. MCF-7 and MiaPaCa Cell Assays

[0474] Peptides produced synthetically were maintained as 30 mM stock in 100% DMSO, while recombinant dimers were diluted in water. All synthetic and recombinant peptides were stored at −80° C. The final concentration of DMSO was <0.1%. MCF-7 and MiaPaCa (ATCC, Rockville, Md.) cells were maintained in RPMI containing 10% FBS. All cells were starved overnight by growing them in RPMI media, which was serum free. Cells were trypsinized, washed twice with PBS before being seeded at 1-3×10³ cells per well in a 96-well plate with a volume of 150 μl/well. All points were done in duplicate in 96-well plates. For antagonist activity assays, immediately before the addition of peptides, all media was gently removed from the wells. Peptides were serially diluted 1:2 in a final volume of 150 μl in a separate plate using RPMI containing 0.1% FBS plus 50 nM IGF-1. This mixture was transferred onto the cells, and the plates were incubated for 72 h at 37° C. in a CO₂ incubator. To quantitate cell number, 10 μl of WST-1 reagent (Roche Molecular Biochemicals, Indianapolis, Ind.) was added to each well and the plates were returned to the 37° C./CO₂ incubator for approximately 2 h. Measurements were then read at 440 nm, with 700 nm used as a reference.

[0475] E. Binding (ALPHAScreen) Assays

[0476] To assay binding, the relative potencies of peptides as compared to IGF-1 were analyzed in a competition system utilizing biotinylated-human IGF-1 (b-hIGF-1) and His-tagged soluble recombinant human IGF-IR (srhIGF-1R-his; R&D systems, Inc., Minneapolis, Minn.). Detection of the receptor ligand interaction was measured in an amplified luminescent proximity homogeneous assay (ALPHAScreen; BioSignal-Packard, Montreal). The assay was performed in 384-well Nunc™white polystyrene microplates (Nalge Nunc International, Naperville, Ill.) with a final volume of 40 μl. Final incubation conditions were 1 nM b-hIGF-1, 10 nM srhIGF-1R-his, 0.025 M HEPES (pH 7.4 at 25° C.), 0.100 M NaCl, 0.1% BSA (Cohn Fraction V; Sigma Chemical Co., St. Louis, Mo.), 10 μg/ml nickel conjugated acceptor beads, and 10 μg/ml streptavidin conjugated donor beads.

[0477] For the first step of the assay, hIGF-1 (PeproTech, Inc., Rocky Hill, N.J.), b-hIGF-1 (see below), and peptides were incubated for 2 h at room temperature. Each concentration of competitor was assayed in duplicate. Non-specific binding was determined in the presence of 3×10⁻⁵ M hIGF-1. In the second step of the assay, acceptor beads were added and the incubation was continued for 0.5 h. In the final step, donor beads were added and the incubation was continued for an additional 1 h. At the end of the incubation period, the fluorescence signal at 520 nm was read on a Fusion-α HT plate reader (Packard BioScience Company, Meriden, Conn.). Primary data were background corrected, normalized to buffer controls, and then expressed as % specific binding. The data were fit to a four-parameter non-linear regression analysis (y=min+(max−min)/(1+10ˆ((logIC50−x)*Hillslope))), which was used to determine IC₅₀ values. The Z′-factor for this assay was greater than 0.7 (Z′=1−(3σ++3σ−)/|μ+−μ−|) and the signal-to-background (S/B) ratio was between 40 and 70.

[0478] Human IGF-1 was biotinylated on free amino groups using Pierce EZ-Link™ Sulfo-NHS-LC-Biotinylation Kit (PN #21430, Pierce, Rockford, Ill.). Human IGF-1, at 2 mg/ml in PBS, pH 7.2, was incubated at room temperature for 30 min with a 20-fold excess of sulfo-NHS-LC-biotin over theoretical total free amino groups. Unreacted biotins were removed by extensive dialysis (Pierce Slide-A-Lyzer® Dialysis Cassettes) against PBS, and degree of conjugation was determined by HABA (2-(4′-hydroxyazobenzene) benzoic acid) assay (Pierce product literature #21430). Number of biotins per hIGF-1 varied between 3 and 5.

[0479] F. FDC-P2 Cell Assays

[0480] Peptides produced synthetically were maintained as 30 mM stock in 100% DMSO, while recombinant dimers were diluted in water. All synthetic and recombinant peptides were stored at −80° C. The final concentration of DMSO was <0.1%. FDC-P2 (obtained from Dr. J. Pierce, National Institutes of Heath, Bethesda, Md.) cells were maintained in RPMI containing 15% FBS and 5% WEHI (Genoquest, Germantown, Md.) at 37° C. in a CO₂ incubator. To initiate experiments, all cells were starved for 5 h in RPMI containing 1% FBS. Cells were seeded at 1×10⁴ cells per well into 96-well plates at a volume of 75 μl/well. Peptides were added at 2× final concentrations and all points were done in duplicate. For antagonist assays, peptides at 2× concentration were serially diluted 1:2 in a final volume of 75 μl in a separate plate using RPMI containing 0.1% FBS and 1 nM IGF-1. This mixture was transferred onto the cells to yield a final volume of 150 μl. The plates were incubated for 48 h at 37° C. in a CO₂ incubator. To quantitate cell number, 10 μl of WST-1 reagent (Roche Molecular Biochemicals, Indianapolis, Ind.) was added to each well and the plates were returned to the 37° C./CO₂ incubator for approximately 2 h. Measurements were then taken at 440 nm, with 700 nm used as a reference.

[0481] G. Results

[0482] Peptide RP33-IGF exhibited an affinity for IGF-1R close to that of IGF-1 (9 nM; Table 23). Other peptides, such as RP54 showed affinity in the micromolar range (Table 23). In contrast to the observations made for IR, competition experiments indicated that IGF-1R Site 1 and 2 peptides were able to compete with each other. This suggested that the functional interactions between Site 1 and Site 2 in IGF-1R differed from those found in IR (unpublished data).

[0483] To determine if any Site 1 peptides could act as antagonists, proliferation assays were established utilizing IGF-1 and IGF-2 responsive human tumor cell lines. Sixteen human tumor cell lines were screened for their ability to proliferate in the presence IGF-1 and IGF-2 under serum-free conditions. Two cell lines, MCF-7 (breast carcinoma) and MiaPaCa (pancreatic carcinoma), showed the best dose response curves for IGF-1 (ED₅₀=5 nM; FIGS. 65A-65F), and were used for subsequent experiments.

[0484] Peptides were synthesized and screened in the proliferation assay at an IGF-1 dose ten times the ED₅₀ (50 nM). Several antagonist peptides were identified, including RP33-IGF, which consistently blocked IGF-1 and IGF-2 proliferation of both MCF-7 and MiaPaCa (FIGS. 66B-66C). In addition, peptides RP52 and RP54 were found to act as antagonists in at least one cell line (Table 26; FIGS. 70A-70B). Peptides RP52 and RP54 are classified as miscellaneous peptides, which were not categorized into any of the formulae (e.g., Formula 1, Formula 2, etc.) disclosed herein.

[0485] Experiments were then performed to determine whether antagonist peptides could block receptor activation at the level of key signaling intermediate, IRS-1. First, the optimal time and concentration of IGF-1 needed for maximal activation of IRS-1 was established (FIGS. 67A-67B and FIGS. 68A-68B). Maximum phosphorylation of IRS-1 was observed after 10 min of treatment and was followed by a drop-off of the signal (FIGS. 67A-67B). This pattern was presumably due to degradation of the IRS-1 protein by a mechanism involving proteasomes (Lee et al., 2000, Mol. Cell. Biol., 2000, 20:1489-1496). Second, RP33-IGF was compared to two unrelated peptides. The RP33-IGF peptide inhibited IRS-1 phosphorylation, whereas the unrelated peptides had no effect in the proliferation assay (FIGS. 69A-69B).

[0486] The RP6KK peptide was also tested for activity, since the RP33-IGF peptide was originally derived from the RP6KK sequence. Both RP6KK and RP33-IGF were found to effectively block activation of IRS-1 by IGF-1 (FIGS. 69A-69B). At the concentration used, greater than 90% of the protein was unphosphorylated, indicating that both peptides efficiently blocked IGF-1R activation. However, RP33-IGF differed from RP6KK by 11 amino acids, and RP33-IGF was a superior IGF-1R antagonist in the cell proliferation assays (Tables 24-25). The difference in biological activity did not appear to be related to stability of the peptides since both were found to remain intact during the course of the assays (unpublished data).

TABLE 23

| Pep. (Clone) | Sequence | Site* Formula | Affin. (μM) | Activ.^{δ} | IC₅₀ (μM) |
|---|---|---|---|---|---|
| RP33-IGF | [chemical structure] | 1 2 | 0.009 | Antag. | 0.1 -MCF-7 0.7 -MiaPaCa |
| RP6KK | [chemical structure] | 1 2 | 0.19 | Antag. | |
| RP52 (20C-3-A3-IGFR) | [chemical structure] | Misc. | ND | Antag. | 0.5 -MCF-7 |
| RP54 (20C-A7-IGFR) | [chemical structure] | Misc. | 1.6 | Antag. | 2.5 -MCF-7 4.3 -MiaPaCa |

Peptide antagonists of IGF-1R identified from primary and secondary library pannings,
*site to which a peptide binds was assigned based on competition assays using both IR and IGF-1R as target;
*affinity was determined using the AlphaScreen assay versus IGF-1 as described herein;
^{δ}antagonism was determined from the proliferation assays in the presence of IGF-1 using MCF-7 and MiaPaCa cells as described herein;
ND = not done;
Pep. = peptide;
Affin. = affinity;
Antag. = antagonist;
Misc. = miscellaneous peptide;
Cysteine residues are boxed.

[0487] TABLE 24
IGF-1R Antagonists in MCF-7 Cells

| | | | Cell- | Bind- | |
|---|---|---|---|---|---|
| | | Site | ular | ing | |
| | | IGF- | IC₅₀ | IC₅₀ | |
| Peptide | Form. | 1R | (M) | (M) | Sequence |
| H2C-A-H6 | 1 | 1 | 4.0E- 07 | 3.2E- 05 | [chemical structure] |
| C1KK | 1 | 1 | 2.8E- 06 | 4.2E- 08 | [chemical structure] |
| RP33K-IGF | 2 | 1 | 2.1E- 08 | 1.8E- 09 | [chemical structure] |
| RP6KK | 2 | 1 | 9.0E- 06 | 1.8E- 07 | [chemical structure] |
| RP54 | Misc. | | 4.3E- 06 | 4.9E- 07 | [chemical structure] |
| RP52 | Misc. | | 4.5E- 07 | 3.0E- 05 | [chemical structure] |
| RP30-IGF-12- RP30-IGF | 2-2 | 1-1 | 3.4E- 06 | 2.4E- 07 | [chemical structure] |
| D8B12-12-RP9 | 6-1 | 2-1 | 6.9E- 06 | N/A | [chemical structure] |

Monomer and dimer peptides which block IGF-1 activity in cell proliferation assays in MCF-7 cells.
Form. = formula;
Misc. = miscellaneous sequence;
Cysteine paris are shaded and underlined;
FY, WF, and L residues from Formula 1 and Formula 2 motifs are shaded and shown in bold.

[0488] TABLE 25
IGF-1R Antagonists in MiaPaCa Cells

| | | | Cell- | Bind- | |
|---|---|---|---|---|---|
| | | | ular | ing | |
| | | Site | IC₅₀ | IC₅₀ | |
| Peptide | Form. | IGF-1R | (M) | (M) | Sequence |
| RP30-IGF | 2 | 1 | 2.0E- 06 | 1.6E- 07 | [chemical structure] |
| RP43 | 2 | 1 | 1.0E- 07 | 1.9E- 07 | [chemical structure] |
| RP33K-IGF | 2 | 1 | 2.0E- 07 | 1.8E- 09 | [chemical structure] |
| L-RP9ex | 1 | 1 | 1.3E- 05 | 2.2E- 06 | [chemical structure] |
| RP54 | Misc. | | 5.9E- 06 | 4.9E- 07 | [chemical structure] |
| RP56 | Misc. | | 9.4E- 06 | 6.0E- 05 | EGYSWLRDVLMEKQAQLKREGSVGRQE |
| | | | | | SEQ ID NO: 2247 |
| RP30-IGF-12- RP30-IGF | 2-2 | 1-1 | 4.6E- 06 | 2.4E- 07 | [chemical structure] |
| D8B12-12-RP9 | 6-1 | 2-1 | 4.7E- 05 | N/A | [chemical structure] |

Monomer and dimer peptides which block IGF-1 activity in cell proliferation assays in MiaPaCa cells.
Form. = formula;
Misc. = miscellaneous sequence;
Cysteine pairs are shaded and underlined;
FY, WF, and L residues from Formula 1 and Formula 2 motifs are shaded and shown in bold.

[0489] TABLE 26
IGF-1R Antagonists in FDC-P2 cells

| | | | Cell- | Bind- | |
|---|---|---|---|---|---|
| | | | ular | ing | |
| | | Site | IC₅₀ | IC₅₀ | |
| Peptide | Form. | IGF-1R | (M) | (M) | Sequence |
| RP30-IGF | 2 | 1 | 4.0E- 06 | 1.6E- 07 | [chemical structure] |
| RP9-lig | 1 | 1 | 3.2E- 04 | 2.2E- 07 | [chemical structure] |
| lig-RP9 | 1 | 1 | 8.8E- 08 | 1.5E- 06 | [chemical structure] |
| RP43 | 2 | 1 | 7.0E- 06 | 1.9E- 07 | [chemical structure] |
| H2C-A-H6 | 1 | 1 | 3.0E- 07 | 3.2E- 05 | [chemical structure] |
| RP6KK | 2 | 1 | 1.0E- 06 | N/A | [chemical structure] |
| C1 | 1 | 1 | 4.0E- 06 | 4.2E- 08 | [chemical structure] |
| RP33-IGF | 2 | 1 | 7.0E- 06 | 1.9E- 06 | [chemical structure] |
| RP6 | 2 | 1 | 5.0E- 06 | 3.5E- 07 | [chemical structure] |
| RP9 | 1 | 1 | 2.0E- 06 | 9.7E- 07 | [chemical structure] |
| RP9-RP9 (C-C) | 1-1 | 1-1 | 3.0E- 05 | 1.2E- 07 | [chemical structure] |
| RP9-RP9 (C—N) | 1-1 | 1-1 | 3.0E- 05 | 1.7E- 07 | [chemical structure] |
| G33-RP9 | 1-1 | 1-1 | 1.0E- 06 | N/A | [chemical structure] |
| RP9-L-RP9 | 1-1 | 1-1 | 9.0E- 07 | 3.4E- 06 | [chemical structure] |
| RP9-L-RP6 | 1-2 | 1-1 | 3.0E- 06 | N/A | [chemical structure] |
| G33-D8B12 | 1-6 | 1-2 | 3.0E- 06 | N/A | [chemical structure] |
| D8B12-RP9 | 6-1 | 2-1 | 1.0E- 05 | N/A | [chemical structure] |

Monomer and dimer peptides which block IGF-1 Activity in cell proliferation assays in FDC-P2 cells.
Form. = formula;
Lig = Diaminopropionic acid with a 2-aminohydroxyacetyl group (CO—CH2—O—NH2) on the side chain amino group;
Numbers such as 17, 19, 12, represent spectific chemical linkers (see Table 3);
C-C = C-terminal to C-terminal linkage;
N-N = N-terminal to N-terminal linkage;
Cysteine pairs are shaded and underlined;
FY, WF, and L residues from Formula 1 and Formula 2 motifs are shaded and shown in bold.

### Example 15

### IGF-1 Agonist Peptides

[0490] A. MCF-7 and MiaPaCa Cell Assays

[0491] Peptides produced synthetically were maintained as 30 mM stock in 100% DMSO, while recombinant dimers were diluted in water. All synthetic and recombinant peptides were stored at −80° C. The final concentration of DMSO was <0.1%. MCF-7 and MiaPaCa (ATCC, Rockville, Md.) cells were maintained in RPMI containing 10% FBS. All cells were starved overnight by growing them in serum-free RPMI media. Cells were trypsinized, washed twice with PBS before being seeded at 1-3×10³ cells per well in a 96-well plate in a volume of 150 μl/well. All points were done in duplicate in 96-well plates. For agonist activity assays, immediately before the addition of peptides, all media was gently removed from the wells. Peptides were serially diluted 1:2 in a final volume of 150 μl in a separate plate using RPMI containing 0.1% FBS. The diluted peptide solutions were transferred onto the cells, and the plates were incubated for 72 h at 37° C. in a CO₂ incubator. To quantitate cell number, 10 μl of WST-1 reagent (Roche Molecular Biochemicals, Indianapolis, Ind.) was added to each well and the plates were returned to the 37° C./CO₂ incubator for approximately 2 h. Measurements were then taken at 440 nm, with 700 nm used as a reference.

[0492] B. FDC-P2 Cell Assays

[0493] Peptides were maintained and stored as indicated above. FDC-P2 cells (obtained from Dr. J. Pierce, NIH) were maintained in RPMI containing 15% FBS and 5% WEHI (Genoquest, Germantown, Md.) at 37° C. in a CO₂ incubator. To initiate experiments, all cells were starved for 5 h in RPMI containing 1% FBS. Cells were seeded at 1×10⁴ cells per well into 96-well plates at a volume of 75 μl/well. Peptides were added at 2× final concentration and all points were done in duplicate. For agonist assays, peptides at 2× concentration were serially diluted 1:2 in a final volume of 75 μl in a separate plate using RPMI containing 0.1% FBS. The diluted peptide solutions were transferred onto the cells to yield a final volume of 150 μl. The plates were incubated for 48 h at 37° C. in a CO₂ incubator. To quantitate cell number, 10 μl of WST-1 reagent (Roche Molecular Biochemicals, Indianapolis, Ind.) was added to each well and the plates were returned to the 37° C. incubator for approximately 2 h. Measurements were taken at 440 nm, with 700 nm used as a reference.

[0494] For these experiments, potencies of peptide competition were determined using the AlphaScreen assay format. Primary data were background corrected, normalized to buffer controls and then expressed as % specific binding. The data were fit to a four-parameter non-linear regression analysis (y=min+(max−min)/(1+10ˆ((logIC₅₀−x)*Hillslope))), which was used to determine IC₅₀ values. The Z′-factor for this assay is greater than 0.7 (Z′=1−(3σ₊+3σ₋)/|μ₊−μ₋|) and the signal-to-background (S/B) ratio was between 40 and 70.

[0495] C. Results

[0496] Several IGF-1R agonist peptides were identified which consistently stimulated proliferation of both MCF-7 and MiaPaCa cells (Tables 27-28; FIGS. 73A-73D and FIGS. 74A-74I). Monomer peptides with IGF-1R agonist activity included RP60, RP48, G33, C1, and L-RP9ex (Tables 27-28). Dimer peptides with IGF-1R agonist activity included RP30-IGF-12-D112, RP30-IGF-12-RP31-IGF, RP31-IGF-12-RP30-IGF, D112-12-RP30-IGF, RP6-L-D8B12, D8B12-12-RP9, D112-12-D112, RP9-12-RP9, and RP9-L-RP6 (Tables 27-28). Agonist peptides were also identified using FDC-P2 cell proliferation assays (Table 29). Monomer peptides with IGF-1R agonist activity included G33-lig, G33, S175, D815, lig-D815, RP31-IGF, and D815 (Table 29). Dimer peptides with IGF-1R agonist activity included RP6-RP9, G33-6-G33, and D815-RP9 (Table 29).

[0497] In addition, peptides with agonist or antagonist activity in MCF-7 or MiaPaCa cell proliferation assays were shown to compete against IGF-1 for binding to IGF-1R (FIGS. 71A-71F and FIGS. 72A-72E). Potencies of peptide competition were determined using the AlphaScreen assay format for peptide monomers RP60, RP48, sG33, L-RP9ex, and 12-RP9ex (FIGS. 71A-71F). Potencies were also determined for dimer peptides rRP30-IGF-12-D112, rRP30-IGF-12-RP31-IGF, rRP31-IGF-12-RP30-IGF, rD112-12-RP30-IGF, and rD112-12-D112 (FIGS. 72A-72E).

[0498] The biological response of the monomers and dimers in the FDC-P2 (myeloid cells; IGF-1R/IGF-1R receptor), MCF-7 (breast cancer cells; hybrid IGF-1R/IR receptor) and MiaPaCa (pancreatic cancer cells; hybrid IGF-1R/IR receptor) assays were compared (Table 30). In some instances, a modulatory effect (agonism or antagonism) was seen in certain cell lines but not in others. For example, the RP30-IGF peptide exhibited antagonist activity in FDC-P2 and MiaPaCa cells, but not in MCF-7 cells (Table 30). The C1 peptide exhibited antagonist activity in FDC-P2 and MCF-7 cells, but not in MiaPaCa cells. The RP9-RP6, L-RP9ex, and D8B12-12-RP9 peptides exhibited either antagonist or agonist activity depending on the cell line used (Table 30). Therefore, it is possible to use the peptides of the invention to target specific cell types with specific modulatory effects.

TABLE 27
IGF-1R Agonists in MCF-7 Cells

| Peptide | Form. | Site IGF-1R | Cellular EC₅₀ (M) | Binding IC₅₀ (M) |
|---|---|---|---|---|
| G33 | 1 | 1 | 3.0E-07 | 6.0E-07 |
| 12-RP9ex | 1 | 1 | 1.0E-05 | 4.5E-07 |
| L-RP9ex | 1 | 1 | 4.2E-06 | 2.2E-06 |
| RP48 | Misc. | | 3.2E-06 | 6.6E-07 |
| RP60 | Misc. | | 2.1E-06 | 1.6E-05 |
| RP9-12-RP9 | 1-1 | 1-1 | 2.4E-06 | N/A |
| RP9-L-RP6 | 1-2 | 1-1 | 1.3E-06 | N/A |
| D112-12-RP30-IGF | 1-2 | 1-1 | 2.5E-07 | 1.7E-07 |
| D112-12-D112 | 1-1 | 1-1 | 3.5E-07 | 6.2E-07 |
| RP30-IGF-12-D112 | 2-1 | 1-1 | 4.1E-07 | 1.1E-06 |
| RP6-L-D8B12 | 2-6 | 1-2 | 7.1E-07 | N/A |
| RP30-IGF-12-RP31-IGF | 2-6 | 1-2 | 1.1E-07 | 1.1E-06 |
| RP31-IGF-12-RP30-IGF | 6-2 | 2-1 | 3.0E-06 | 7.2E-08 |
| D8B12-12-RP9 | 6-1 | 2-1 | 3.5E-07 | N/A |

| Peptide | Sequence |
|---|---|
| G33 | [chemical structure] |
| 12-RP9ex | [chemical structure] |
| L-RP9ex | [chemical structure] |
| RP48 | [chemical structure] |
| RP60 | [chemical structure] |
| RP9-12-RP9 | [chemical structure] |
| RP9-L-RP6 | [chemical structure] |
| D112-12-RP30-IGF | [chemical structure] |
| D112-12-D112 | [chemical structure] |
| RP30-IGF-12-D112 | [chemical structure] |
| RP6-L-D8B12 | [chemical structure] |
| RP30-IGF-12-RP31-IGF | [chemical structure] |
| RP31-IGF-12-RP30-IGF | [chemical structure] |
| D8B12-12-RP9 | [chemical structure] |

Monomer and dimer peptides which stimulate cell proliferation using the MCF-7 cells.
Form. = formula;
N/A = not available;
Misc. = miscellaneous sequence;
Cysteine pairs are shaded and underlined;
FY, WF, and L residues from Formula 1 and Formula 2 motifs are shaded and shown in bold.

[0499] TABLE 28
IGF-1R Agonists in MiaPaCa Cells

| Peptide | Form. | Site IGF-1R | Cellular EC50 (M) | Binding IC50 (M) |
|---|---|---|---|---|
| RP48 | Misc. | | 7.0E-06 | 6.6E-07 |
| RP60 | Misc. | | 3.1E-06 | 1.6E-05 |
| RP9-L-RP6 | 1-2 | 1-1 | 1.0E-06 | N/A |
| D112-12-RP30-IGF | 1-2 | 1-1 | 2.2E-06 | 1.7E-07 |
| D112-12-D112 | 1-1 | 1-1 | 2.5E-06 | 6.2E-07 |
| RP9-12-RP9 | 1-1 | 1-1 | 2.7E-06 | N/A |
| RP6-L-D8B12 | 2-6 | 1-2 | 5.0E-06 | N/A |
| RP31-IGF-12-RP30-IGF | 6-2 | 2-1 | 4.4E-06 | 7.2E-08 |
| RP30-IGF-12-RP31-IGF | 2-6 | 1-2 | 6.8E-06 | 1.1E-06 |
| D8B12-12-RP9 | 6-1 | 2-1 | 1.0E-06 | N/A |

| Peptide | Sequence |
|---|---|
| RP48 | [chemical structure] |
| RP60 | [chemical structure] |
| RP9-L-RP6 | [chemical structure] |
| D112-12-RP30-IGF | [chemical structure] |
| D112-12-D112 | [chemical structure] |
| RP9-12-RP9 | [chemical structure] |
| RP6-L-D8B12 | [chemical structure] |
| RP31-IGF-12-RP30-IGF | [chemical structure] |
| RP30-IGF-12-RP31-IGF | [chemical structure] |
| D8B12-12-RP9 | [chemical structure] |

Monomer and dimer peptides which stimulate cell proliferation using the MiaPaCa cells.
Form. = formula;
N/A = not available;
Misc. = miscellaneous sequence;
Cysteine pairs are shaded and underlined;
FY, WF, and L residues from Formula 1 and Formula 2 motifs are shaded and shown in bold.

[0500] TABLE 29
IGF-1R Agonists in FDC-P2 Cells

| | | | Cell- | Bind- | |
|---|---|---|---|---|---|
| | | | ular | ing | |
| | | Site | EC₅₀ | IC₅₀ | |
| Peptide | Form. | IGF-1R | (M) | (M) | Sequence |
| G33-lig | 1 | 1 | 3.0E-06 | 7.1E-07 | [chemical structure] |
| G33 | 1 | 1 | 2.0E-06 | 6.0E-07 | [chemical structure] |
| S175 | 1 | 1 | 1.0E-05 | 7.1E-06 | [chemical structure] |
| D815 | 6 | 2 | 3.0E-06 | 1.1E-05 | [chemical structure] |
| lig-D815 | 6 | 2 | 1.0E-05 | 2.2E-06 | [chemical structure] |
| RP31-IGF | 6 | 2 | 2.0E-05 | 8.4E-07 | [chemical structure] |
| D815 | 6 | 2 | 1.0E-06 | 1.5E-06 | [chemical structure] |
| RP6-RP9 | 2-1 | 1-1 | 6.0E-06 | N/A | [chemical structure] |
| G33-6-G33 | 1-1 | 1-1 | 3.0E-06 | 1.4E-07 | [chemical structure] |
| D815-RP9 | 6-1 | 2-1 | 3.0E-06 | 1.1E-06 | [chemical structure] |

Monomer and dimer peptides which stimulate cell proliferation using the FDC-P2 cells.
Form. = formula;
N/A = not available;
Lig = Diaminopropionic acid with a 2-aminohydroxyacetyl group (CO—CH2—O—NH2) on the side chain amino group;
Cysteine paris are shaded and underlined;
FY, WF, and L residues from Formula 1 and Formula 2 motifs are shaded and shown in bold.

[0501] TABLE 30

| | | | FDC-P2 | FDC-P2 | MCF-7 | MCF-7 | MiaPaCa | MiaPaCa |
|---|---|---|---|---|---|---|---|---|
| Peptide | Site IGFR/Formula | | Agonist | Antagonist | Agonist | Antagonist | Agonist | Antagonist |
| Monomers: | | | | | | | | |
| D815 | 2 (cys.) | 6 | + | | | | | |
| RP30-IGF | 1 (cys.) | 2 | | + | No | No | | + |
| RP31-IGF | 2 (cys.) | 6 | + | | + | | No | No |
| G33 | 1 (cys.) | 1 | + | | + | | + | |
| RP9 | 1 | 1 | | + | No | No | No | No |
| RP6 | 1 (cys.) | 2 | | + | | + | No | No |
| C1 | 1 (cys.) | 1 | | + | | + | No | No |
| RP33-IGF | 1 (cys.) | 2 | | + | | + | | + |
| H2C-A-H6 | 1 | 1 | ND | ND | | + | | + |
| RP43 | 1 (cys.) | 2 | | + | No | No | | + |
| RP48 | Misc. (cys.) | | ND | ND | + | | + | |
| RP52 | Misc. (cys.) | | ND | ND | No | No | | + |
| RP54 | Misc. (cys.) | | ND | ND | | + | | + |
| RP56 | Misc. | | ND | ND | No | No | | + |
| RP60 | Misc. (cys.) | | ND | ND | + | | + | |
| Dimers: | | | | | | | | |
| RP9-12-RP9 | 1-1 | 1-1 | ND | ND | + | | + | |
| D8B12-12-RP9 | 2-1 (cys.) | 2-1 | ND | ND | + | | + | |
| RP9-L-RP6 | 1-1 (cys.) | 1-2 | | + | + | | + | |
| RP6-D8B12 | 1-2 (cys.) | 2-2 | ND | ND | + | | + | |
| RP30-IGF-C1 | 1-1 (cys.) | 2-1 | ND | ND | + | | + | |
| C1-RP30-IGF | 1-1 (cys.) | 1-1 | ND | ND | + | | + | |
| RP30-IGF-12-RP30-IGF | 1-1 (cys.) | 2-2 | ND | ND | | + | | + |
| RP30-IGF-12-RP31-IGF | 1-2 (cys.) | 2-2 | ND | ND | + | | + | |
| RP31-IGF-12-RP30-IGF | 2-1 (cys.) | 2-2 | ND | ND | + | | + | |
| RP6-D8B12 | 1-2 (cys.) | 2-2 | ND | ND | + | | + | |

ND = Not Done;
+ = Effect observed;
No = No effect observed;
Cys. = contains putative cysteine loop.

[0502] Incorporated herein by reference in its entirety is the Sequence Listing for the application, comprising SEQ ID NO:1 to SEQ ID NO:2227. The Sequence Listing is disclosed on three CD-ROMs, designated “CRF”, “Copy 1”, and “Copy 2”. The Sequence Listing is a computer-readable ASCII file named “18784056PC.app.txt”, created on Sep. 23, 2002, in IBM-PC machine format, on a MS-Windows®98 operating system. The 18784056PC.app.txt file is 927,477 bytes in size.

[0503] As various changes can be made in the above compositions and methods without departing from the scope and spirit of the invention, it is intended that all subject matter contained in the above description, shown in the accompanying drawings, or defined in the appended claims be interpreted as illustrative, and not in a limiting sense.

[0504] The contents of all patents, patent applications, published articles, books, reference manuals, texts and abstracts cited herein are hereby incorporated by reference in their entirety to more fully describe the state of the art to which the present invention pertains.

What is claimed is:

1. A method of modulating insulin-like growth factor receptor activity in insulin-like growth factor-responsive mammalian cells comprising: contacting the cells with an amino acid sequence in an amount sufficient to modulate the activity of insulin-like growth factor receptor, wherein i) the amino acid sequence comprises a Formula 1 sequence, X₁X₂X₃X₄X_{5,} such that X_{1,} X_{2,} and X₅ are selected from the group consisting of phenylalanine and tyrosine, X₃ is selected from the group consisting of aspartic acid, glutamic acid, glycine and serine, and X₄ is selected from group consisting of tryptophan, tyrosine and phenylalanine; and ii) with the proviso that the amino acid sequence is not insulin, insulin-like growth factor, an anti-insulin receptor antibody, an anti-insulin-like growth factor receptor antibody, or fragments thereof.

The application's sequence listing, which the Patent Office published only in electronic form, follows.

SEQUENCE LISTING (2271 sequences)

SEQ ID NO: 1 - protein, 40 aa, Artificial Sequence
  Description of Artificial Sequence: Synthetic peptide
IRDMHYVWVQDRDRYINGVRQWYISDRYNPGSAFYRWFID

SEQ ID NO: 2 - protein, 40 aa, Artificial Sequence
  Description of Artificial Sequence: Synthetic peptide
RMGLQALAHYRKSAGPIFLSSGSVIKGSEGDPFYAWFRLQ

SEQ ID NO: 3 - protein, 40 aa, Artificial Sequence
  Description of Artificial Sequence: Synthetic peptide
MPVSLFRRVWDYRDGEHETLESHYVVPQAALDRLFYSWFS

SEQ ID NO: 4 - protein, 40 aa, Artificial Sequence
  Description of Artificial Sequence: Synthetic peptide
PLYGGGIHLYYPGTMGYVPGFPRQVKVLGDADKNFYDWFM

SEQ ID NO: 5 - protein, 39 aa, Artificial Sequence
  Description of Artificial Sequence: Synthetic peptide
YRGMLVLGRISDGAGKVASEPPARIGQKVFAVNFYDWFV

SEQ ID NO: 6 - protein, 39 aa, Artificial Sequence
  Description of Artificial Sequence: Synthetic peptide
SGCCRLLGLRWMFIVIVGWSGALVCQSAASAAGFYDWFV

SEQ ID NO: 7 - protein, 21 aa, Artificial Sequence
  Description of Artificial Sequence: Synthetic peptide
IGGQGQHQDGNFYDWFVEALA

SEQ ID NO: 8 - protein, 20 aa, Artificial Sequence
  Description of Artificial Sequence: Synthetic peptide
VFWNCRSQQLDFYEWFEQAA

SEQ ID NO: 9 - protein, 26 aa, Artificial Sequence
  Description of Artificial Sequence: Synthetic peptide
RVAGAISAPGLVSNKQDGLFYSWFRE

SEQ ID NO: 10 - protein, 20 aa, Artificial Sequence
  Description of Artificial Sequence: Synthetic peptide
VLQARHGCDSVSDCFYEWFA

SEQ ID NO: 11 - protein, 20 aa, Artificial Sequence
  Description of Artificial Sequence: Synthetic peptide
GAFYRWFHEALVGSERVPDV

SEQ ID NO: 12 - protein, 20 aa, Artificial Sequence
  Description of Artificial Sequence: Synthetic peptide
HEAFYDWFSALVDGGYELMG

SEQ ID NO: 13 - protein, 20 aa, Artificial Sequence
  Description of Artificial Sequence: Synthetic peptide
RIGGGWARSEGFYEWFVREL

SEQ ID NO: 14 - protein, 20 aa, Artificial Sequence
  Description of Artificial Sequence: Synthetic peptide
  MOD_RES (7): Unknown amino acid
  MOD_RES (11): Unknown amino acid
LPAGGAXGFAXRGFYEWFES

SEQ ID NO: 15 - protein, 20 aa, Artificial Sequence
  Description of Artificial Sequence: Synthetic peptide
GHSWALVRHVDRLFYEWFDL

SEQ ID NO: 16 - protein, 20 aa, Artificial Sequence
  Description of Artificial Sequence: Synthetic peptide
LGTSAGQGVGHRAFYQWFQS

SEQ ID NO: 17 - protein, 20 aa, Artificial Sequence
  Description of Artificial Sequence: Synthetic peptide
RGGGTFYEWFESALRKHGAG

SEQ ID NO: 18 - protein, 20 aa, Artificial Sequence
  Description of Artificial Sequence: Synthetic peptide
NSSGQQVVGLTFYSWFASQV

SEQ ID NO: 19 - protein, 20 aa, Artificial Sequence
  Description of Artificial Sequence: Synthetic peptide
FYGWFSRQLSLTPRDDWGLP

SEQ ID NO: 20 - protein, 20 aa, Artificial Sequence
  Description of Artificial Sequence: Synthetic peptide
RMFYEWFWSQMGAGPTEGSA

SEQ ID NO: 21 - protein, 21 aa, Artificial Sequence
  Description of Artificial Sequence: Synthetic peptide
IGGQGQHQDGNFYDWFVEALA

SEQ ID NO: 22 - protein, 20 aa, Artificial Sequence
  Description of Artificial Sequence: Synthetic peptide
RDKPTDQEEQNWSFYEWFRH

SEQ ID NO: 23 - protein, 20 aa, Artificial Sequence
  Description of Artificial Sequence: Synthetic peptide
WSALLSVMDTGFYAWFDDAV

SEQ ID NO: 24 - protein, 20 aa, Artificial Sequence
  Description of Artificial Sequence: Synthetic peptide
SRDQTNFTFNSAGFYGWFER

SEQ ID NO: 25 - protein, 17 aa, Artificial Sequence
  Description of Artificial Sequence: Synthetic peptide
GVGTLTMSSDAFYTWFV

SEQ ID NO: 26 - protein, 16 aa, Artificial Sequence
  Description of Artificial Sequence: Synthetic peptide
IGGSFVEFYGWFNDQV

SEQ ID NO: 27 - protein, 20 aa, Artificial Sequence
  Description of Artificial Sequence: Synthetic peptide
DIGSDGHGRRWDSFYRWFEM

SEQ ID NO: 28 - protein, 20 aa, Artificial Sequence
  Description of Artificial Sequence: Synthetic peptide
VLQARHGCDSVSDCFYEWFA

SEQ ID NO: 29 - protein, 20 aa, Artificial Sequence
  Description of Artificial Sequence: Synthetic peptide
DPERMQSDVGFYEWFRAAVG

SEQ ID NO: 30 - protein, 20 aa, Artificial Sequence
  Description of Artificial Sequence: Synthetic peptide
DPERMQSDVGFYEWFRAAVG

SEQ ID NO: 31 - protein, 20 aa, Artificial Sequence
  Description of Artificial Sequence: Synthetic peptide
DIGSDGHGRRWDSFYRWFEM

SEQ ID NO: 32 - protein, 20 aa, Artificial Sequence
  Description of Artificial Sequence: Synthetic peptide
PFYQWFLDQSVGGSRGGGLR

SEQ ID NO: 33 - protein, 20 aa, Artificial Sequence
  Description of Artificial Sequence: Synthetic peptide
AVAPLSVRGRDSGFYSWFSS

SEQ ID NO: 34 - protein, 21 aa, Artificial Sequence
  Description of Artificial Sequence: Synthetic peptide
  MOD_RES (1)..(10): Variable amino acid
  MOD_RES (18)..(21): Variable amino acid
XXXXXXXXXXNFYDWFVXXXX

SEQ ID NO: 35 - protein, 21 aa, Artificial Sequence
  Description of Artificial Sequence: Synthetic peptide
GRVDWLQRNANFYDWFVAELG

SEQ ID NO: 36 - protein, 21 aa, Artificial Sequence
  Description of Artificial Sequence: Synthetic peptide
RMYFSTGAPQNFYDWFVQEWD

SEQ ID NO: 37 - protein, 21 aa, Artificial Sequence
  Description of Artificial Sequence: Synthetic peptide
HHTQGLQVQRNFYDWFVNELR

SEQ ID NO: 38 - protein, 21 aa, Artificial Sequence
  Description of Artificial Sequence: Synthetic peptide
MHRMQHDGTSNFYDWFVLQWA

SEQ ID NO: 39 - protein, 21 aa, Artificial Sequence
  Description of Artificial Sequence: Synthetic peptide
AMHVVAQGGPNFYDWFVRELR

SEQ ID NO: 40 - protein, 21 aa, Artificial Sequence
  Description of Artificial Sequence: Synthetic peptide
AIQMNGNLAFNFYDWFVRELT

SEQ ID NO: 41 - protein, 21 aa, Artificial Sequence
  Description of Artificial Sequence: Synthetic peptide
TDRKSVQEPRNFYDWFVWAAR

SEQ ID NO: 42 - protein, 21 aa, Artificial Sequence
  Description of Artificial Sequence: Synthetic peptide
PHGHRGFAQSNFYDWFVTQEE

SEQ ID NO: 43 - protein, 21 aa, Artificial Sequence
  Description of Artificial Sequence: Synthetic peptide
RLASASVPGQNFYDWFVDQLL

SEQ ID NO: 44 - protein, 21 aa, Artificial Sequence
  Description of Artificial Sequence: Synthetic peptide
RQSEFSTLNSNFYDWFVRELE

SEQ ID NO: 45 - protein, 21 aa, Artificial Sequence
  Description of Artificial Sequence: Synthetic peptide
GQAQLSIRDVNFYDWFVQQLV

SEQ ID NO: 46 - protein, 21 aa, Artificial Sequence
  Description of Artificial Sequence: Synthetic peptide
MSEPAVGVNGNFYDWFVAQLF

SEQ ID NO: 47 - protein, 21 aa, Artificial Sequence
  Description of Artificial Sequence: Synthetic peptide
VGTGRARLDRNFYDWFVGQYS

SEQ ID NO: 48 - protein, 21 aa, Artificial Sequence
  Description of Artificial Sequence: Synthetic peptide
SREAVQKRNANFYDWFVQQLS

SEQ ID NO: 49 - protein, 21 aa, Artificial Sequence
  Description of Artificial Sequence: Synthetic peptide
LAQFAGSRNQNFYDWFVEQLG

SEQ ID NO: 50 - protein, 21 aa, Artificial Sequence
  Description of Artificial Sequence: Synthetic peptide
GQEYFDQMGLNFYDWFVRELD

SEQ ID NO: 51 - protein, 21 aa, Artificial Sequence
  Description of Artificial Sequence: Synthetic peptide
RQPSQPPHGSNFYDWFVEAIN

SEQ ID NO: 52 - protein, 21 aa, Artificial Sequence
  Description of Artificial Sequence: Synthetic peptide
LMQSLGSGSTNFYDWFVQQMV

SEQ ID NO: 53 - protein, 21 aa, Artificial Sequence
  Description of Artificial Sequence: Synthetic peptide
DQQRSACDGTNFYDWFVCQLS

SEQ ID NO: 54 - protein, 21 aa, Artificial Sequence
  Description of Artificial Sequence: Synthetic peptide
LDGTKACQRVNFYDWFVCQTE

SEQ ID NO: 55 - protein, 21 aa, Artificial Sequence
  Description of Artificial Sequence: Synthetic peptide
PEARRTVVHSNFYDWFVAQLS

SEQ ID NO: 56 - protein, 21 aa, Artificial Sequence
  Description of Artificial Sequence: Synthetic peptide
PWMLSVGIQDNFYDWFVGLDS

SEQ ID NO: 57 - protein, 21 aa, Artificial Sequence
  Description of Artificial Sequence: Synthetic peptide
ASHQRGGSSDNFYDWFVAQMR

SEQ ID NO: 58 - protein, 21 aa, Artificial Sequence
  Description of Artificial Sequence: Synthetic peptide
TLEREGEFSGNFYDWFVEQLH

SEQ ID NO: 59 - protein, 21 aa, Artificial Sequence
  Description of Artificial Sequence: Synthetic peptide
DRQSIGSVHGDFYDWFVSALG

SEQ ID NO: 60 - protein, 21 aa, Artificial Sequence
  Description of Artificial Sequence: Synthetic peptide
DWDKLGSLSENFYDWFVDQLA

SEQ ID NO: 61 - protein, 21 aa, Artificial Sequence
  Description of Artificial Sequence: Synthetic peptide
VRVVLNQSGRNFYDWFVIQLE

SEQ ID NO: 62 - protein, 21 aa, Artificial Sequence
  Description of Artificial Sequence: Synthetic peptide
MASWQSRTPDNFYDWFVRELS

SEQ ID NO: 63 - protein, 21 aa, Artificial Sequence
  Description of Artificial Sequence: Synthetic peptide
TTCHPRGEDCNFYDWFVLQLR

SEQ ID NO: 64 - protein, 21 aa, Artificial Sequence
  Description of Artificial Sequence: Synthetic peptide
VRGNDSVLRANFYDWFVDQLS

SEQ ID NO: 65 - protein, 21 aa, Artificial Sequence
  Description of Artificial Sequence: Synthetic peptide
TPRSQVRSDHNFYDWFVYQLA

SEQ ID NO: 66 - protein, 21 aa, Artificial Sequence
  Description of Artificial Sequence: Synthetic peptide
ESLTGSRPDRNFYDWFVQQTS

SEQ ID NO: 67 - protein, 21 aa, Artificial Sequence
  Description of Artificial Sequence: Synthetic peptide
PQSLTEVRTGNFYDWFVVQLH

SEQ ID NO: 68 - protein, 21 aa, Artificial Sequence
  Description of Artificial Sequence: Synthetic peptide
DVGMGRVKETNFYDWFVRQLI

SEQ ID NO: 69 - protein, 21 aa, Artificial Sequence
  Description of Artificial Sequence: Synthetic peptide
GADDIRSLNTNFYDWFVNQLS

SEQ ID NO: 70 - protein, 21 aa, Artificial Sequence
  Description of Artificial Sequence: Synthetic peptide
GVSIQAGYKTNFYDWFVEAVR

SEQ ID NO: 71 - protein, 21 aa, Artificial Sequence
  Description of Artificial Sequence: Synthetic peptide
VGEHRQMSVGNFYDWFVMQIA

SEQ ID NO: 72 - protein, 21 aa, Artificial Sequence
  Description of Artificial Sequence: Synthetic peptide
GSSLGRSGPGNFYDWFVDQLE

SEQ ID NO: 73 - protein, 21 aa, Artificial Sequence
  Description of Artificial Sequence: Synthetic peptide
HRQQDVVRQGNFYDWFVQALE

SEQ ID NO: 74 - protein, 21 aa, Artificial Sequence
  Description of Artificial Sequence: Synthetic peptide
QDTFLTAREGNFYDWFIRALE

SEQ ID NO: 75 - protein, 21 aa, Artificial Sequence
  Description of Artificial Sequence: Synthetic peptide
EAIMREEGQANFYDWFVRQLE

SEQ ID NO: 76 - protein, 21 aa, Artificial Sequence
  Description of Artificial Sequence: Synthetic peptide
VCDVSTGGGTNFYDWFVCQVG

SEQ ID NO: 77 - protein, 21 aa, Artificial Sequence
  Description of Artificial Sequence: Synthetic peptide
PQPRSASTPLNFYDWFVQATG

SEQ ID NO: 78 - protein, 21 aa, Artificial Sequence
  Description of Artificial Sequence: Synthetic peptide
GVSRGSGGDPNFYDWFVMQLR

SEQ ID NO: 79 - protein, 21 aa, Artificial Sequence
  Description of Artificial Sequence: Synthetic peptide
GPGRHDSSRGNFYDWFVEQLA

SEQ ID NO: 80 - protein, 21 aa, Artificial Sequence
  Description of Artificial Sequence: Synthetic peptide
ERFALEVQGSNFYDWFVRQVI

SEQ ID NO: 81 - protein, 20 aa, Artificial Sequence
  Description of Artificial Sequence: Synthetic peptide
NLKSSATVGGNFYDWFVEQL

SEQ ID NO: 82 - protein, 21 aa, Artificial Sequence
  Description of Artificial Sequence: Synthetic peptide
MEGPPAGGPLNFYDWFVAQVD

SEQ ID NO: 83 - protein, 21 aa, Artificial Sequence
  Description of Artificial Sequence: Synthetic peptide
RLDVAGHRGGNFYDWFVKQLH

SEQ ID NO: 84 - protein, 21 aa, Artificial Sequence
  Description of Artificial Sequence: Synthetic peptide
PWSDHEALNQNFYDWFVSQVL

SEQ ID NO: 85 - protein, 21 aa, Artificial Sequence
  Description of Artificial Sequence: Synthetic peptide
EDRLGNGESTNFYDWFVRQLA

SEQ ID NO: 86 - protein, 21 aa, Artificial Sequence
  Description of Artificial Sequence: Synthetic peptide
GKLVASTLDDNFYDWFVRQLS

SEQ ID NO: 87 - protein, 21 aa, Artificial Sequence
  Description of Artificial Sequence: Synthetic peptide
SGPVVQTQNGNFYDWFVHQLR

SEQ ID NO: 88 - protein, 21 aa, Artificial Sequence
  Description of Artificial Sequence: Synthetic peptide
VDRAGPAGSDNFYDWFVAQLD

SEQ ID NO: 89 - protein, 21 aa, Artificial Sequence
  Description of Artificial Sequence: Synthetic peptide
SLGRNDRPDENFYDWFVSQVQ

SEQ ID NO: 90 - protein, 21 aa, Artificial Sequence
  Description of Artificial Sequence: Synthetic peptide
RVMATANAPMNFYDWFVVQLQ

SEQ ID NO: 91 - protein, 21 aa, Artificial Sequence
  Description of Artificial Sequence: Synthetic peptide
NGVERAGTGDNFYDWFVAQLH

SEQ ID NO: 92 - protein, 21 aa, Artificial Sequence
  Description of Artificial Sequence: Synthetic peptide
PFAGKGDKTGNFYDWFVSLTG

SEQ ID NO: 93 - protein, 21 aa, Artificial Sequence
  Description of Artificial Sequence: Synthetic peptide
GMPQEYMDQVNFYDWFVAQVD

SEQ ID NO: 94 - protein, 21 aa, Artificial Sequence
  Description of Artificial Sequence: Synthetic peptide
MGTPAVGDGANFYDWFVRQLG

SEQ ID NO: 95 - protein, 21 aa, Artificial Sequence
  Description of Artificial Sequence: Synthetic peptide
SKCKAWYGANNFYDWFVWQVD

SEQ ID NO: 96 - protein, 21 aa, Artificial Sequence
  Description of Artificial Sequence: Synthetic peptide
EAASLGSQDRNFYDWFVRQVV

SEQ ID NO: 97 - protein, 21 aa, Artificial Sequence
  Description of Artificial Sequence: Synthetic peptide
VERSASSQDGNFYDWFVVQIR

SEQ ID NO: 98 - protein, 21 aa, Artificial Sequence
  Description of Artificial Sequence: Synthetic peptide
TSEVQRRSQDNFYDWFVAQVA

SEQ ID NO: 99 - protein, 21 aa, Artificial Sequence
  Description of Artificial Sequence: Synthetic peptide
ERSAAGFREGNFYDWFVAQVN

SEQ ID NO: 100 - protein, 21 aa, Artificial Sequence
  Description of Artificial Sequence: Synthetic peptide
RAERGSMRDSNFYDWFVQQLP

SEQ ID NO: 101 - protein, 21 aa, Artificial Sequence
  Description of Artificial Sequence: Synthetic peptide
LAMSVASRPANFYDWFVAQIV

SEQ ID NO: 102 - protein, 21 aa, Artificial Sequence
  Description of Artificial Sequence: Synthetic peptide
HNSSSPMRTGNFYDWFVQELR

SEQ ID NO: 103 - protein, 20 aa, Artificial Sequence
  Description of Artificial Sequence: Synthetic peptide
SALSGPVQPINFYDWFVTGM

SEQ ID NO: 104 - protein, 21 aa, Artificial Sequence
  Description of Artificial Sequence: Synthetic peptide
GAQAIREIHHNFYDWFVAQVT

SEQ ID NO: 105 - protein, 21 aa, Artificial Sequence
  Description of Artificial Sequence: Synthetic peptide
RGQRESDSGTNFYDWFVGAIR

SEQ ID NO: 106 - protein, 21 aa, Artificial Sequence
  Description of Artificial Sequence: Synthetic peptide
VQEGLSGMEGNFYDWFVDQLF

SEQ ID NO: 107 - protein, 21 aa, Artificial Sequence
  Description of Artificial Sequence: Synthetic peptide
RLDRSSTSGVNFYDWFVAQVG

SEQ ID NO: 108 - protein, 21 aa, Artificial Sequence
  Description of Artificial Sequence: Synthetic peptide
GSQHSGREPHNFYDWFVAQVG

SEQ ID NO: 109 - protein, 21 aa, Artificial Sequence
  Description of Artificial Sequence: Synthetic peptide
GRGDQRHETTNFYDWFVRELQ

SEQ ID NO: 110 - protein, 21 aa, Artificial Sequence
  Description of Artificial Sequence: Synthetic peptide
PRMVEKPSEDNFYDWFVTQLS

SEQ ID NO: 111 - protein, 21 aa, Artificial Sequence
  Description of Artificial Sequence: Synthetic peptide
RVGIQVDPHTNFYDWFVIQLT

SEQ ID NO: 112 - protein, 21 aa, Artificial Sequence
  Description of Artificial Sequence: Synthetic peptide
RSSGGLLSQGNFYDWFVSQLE

SEQ ID NO: 113 - protein, 21 aa, Artificial Sequence
  Description of Artificial Sequence: Synthetic peptide
SDARQAGLQENFYDWFVSQVR

SEQ ID NO: 114 - protein, 21 aa, Artificial Sequence
  Description of Artificial Sequence: Synthetic peptide
PPYRSSRLGENFYDWFVMQVR

SEQ ID NO: 115 - protein, 21 aa, Artificial Sequence
  Description of Artificial Sequence: Synthetic peptide
QEVTRTRDDKNFYDWFVSQIF

SEQ ID NO: 116 - protein, 21 aa, Artificial Sequence
  Description of Artificial Sequence: Synthetic peptide
SRAPYGSTAGNFYDWFVQAVS

SEQ ID NO: 117 - protein, 21 aa, Artificial Sequence
  Description of Artificial Sequence: Synthetic peptide
  MOD_RES (1): Unknown amino acid
XDGQSVSSKGNFYDWFVQQMT

SEQ ID NO: 118 - protein, 21 aa, Artificial Sequence
  Description of Artificial Sequence: Synthetic peptide
RLMGGIAEPQNFYDWFVREVA

SEQ ID NO: 119 - protein, 21 aa, Artificial Sequence
  Description of Artificial Sequence: Synthetic peptide
SAGHHMPRESNFYDWFVDQVV

SEQ ID NO: 120 - protein, 21 aa, Artificial Sequence
  Description of Artificial Sequence: Synthetic peptide
LGAAETWDGINFYDWFVKQVS

SEQ ID NO: 121 - protein, 21 aa, Artificial Sequence
  Description of Artificial Sequence: Synthetic peptide
VGHSGVPPYPNFYDWFVMQVS

SEQ ID NO: 122 - protein, 21 aa, Artificial Sequence
  Description of Artificial Sequence: Synthetic peptide
VTMLDKGAQDNFYDWFVREVA

SEQ ID NO: 123 - protein, 21 aa, Artificial Sequence
  Description of Artificial Sequence: Synthetic peptide
HHSPGNEHGYNFYDWFVLQVA

SEQ ID NO: 124 - protein, 21 aa, Artificial Sequence
  Description of Artificial Sequence: Synthetic peptide
GSIAQLIMRANFYDWFVEQTN

SEQ ID NO: 125 - protein, 21 aa, Artificial Sequence
  Description of Artificial Sequence: Synthetic peptide
LKGSSQPLSVNFYDWFVQQIK

SEQ ID NO: 126 - protein, 21 aa, Artificial Sequence
  Description of Artificial Sequence: Synthetic peptide
PASNKNSLAENFYDWFVQQTR

SEQ ID NO: 127 - protein, 21 aa, Artificial Sequence
  Description of Artificial Sequence: Synthetic peptide
HVEHMAVGDGNFYDWFVVQLR

SEQ ID NO: 128 - protein, 21 aa, Artificial Sequence
  Description of Artificial Sequence: Synthetic peptide
RGMTGMVGRGNFYDWFVGQLR

SEQ ID NO: 129 - protein, 21 aa, Artificial Sequence
  Description of Artificial Sequence: Synthetic peptide
GLRSEQGNRLNFYDWFVAQIA

SEQ ID NO: 130 - protein, 21 aa, Artificial Sequence
  Description of Artificial Sequence: Synthetic peptide
RVREKLPRPENFYDWFVNQIH

SEQ ID NO: 131 - protein, 21 aa, Artificial Sequence
  Description of Artificial Sequence: Synthetic peptide
SNPSRQDASVNFYDWFVREVA

SEQ ID NO: 132 - protein, 21 aa, Artificial Sequence
  Description of Artificial Sequence: Synthetic peptide
QSVDLSRPDSNFYDWFVEVLS

SEQ ID NO: 133 - protein, 21 aa, Artificial Sequence
  Description of Artificial Sequence: Synthetic peptide
IGGQGQHQDGNFYDWFVEALA

SEQ ID NO: 134 - protein, 21 aa, Artificial Sequence
  Description of Artificial Sequence: Synthetic peptide
VEVQRHIRKDNFYDWFVKQID

SEQ ID NO: 135 - protein, 21 aa, Artificial Sequence
  Description of Artificial Sequence: Synthetic peptide
CWARPCGDAANFYDWFVQQAS

SEQ ID NO: 136 - protein, 21 aa, Artificial Sequence
  Description of Artificial Sequence: Synthetic peptide
RHERGKEGPGNFYDWFVSQVV

SEQ ID NO: 137 - protein, 21 aa, Artificial Sequence
  Description of Artificial Sequence: Synthetic peptide
ERSPRPALASNFYDWFVQQVV

SEQ ID NO: 138 - protein, 21 aa, Artificial Sequence
  Description of Artificial Sequence: Synthetic peptide
IARMRETFQPNFYDWFVDQLA

SEQ ID NO: 139 - protein, 21 aa, Artificial Sequence
  Description of Artificial Sequence: Synthetic peptide
GRGQGLKRPDNFYDWFVAAAK

SEQ ID NO: 140 - protein, 21 aa, Artificial Sequence
  Description of Artificial Sequence: Synthetic peptide
YSIEVQDWNENFYDWFVSQLG

SEQ ID NO: 141 - protein, 21 aa, Artificial Sequence
  Description of Artificial Sequence: Synthetic peptide
TWMWEERKQDNFYDWFVGQLK

SEQ ID NO: 142 - protein, 21 aa, Artificial Sequence
  Description of Artificial Sequence: Synthetic peptide
VTFTSAVFHENFYDWFVRQVS

SEQ ID NO: 143 - protein, 21 aa, Artificial Sequence
  Description of Artificial Sequence: Synthetic peptide
LAINDLVTHKNFYDWFVDQLR

SEQ ID NO: 144 - protein, 21 aa, Artificial Sequence
  Description of Artificial Sequence: Synthetic peptide
GAVGLAEAGPNFYDWFVSQVQ

SEQ ID NO: 145 - protein, 21 aa, Artificial Sequence
  Description of Artificial Sequence: Synthetic peptide
RYRGERHDGRNFYDWFVEQVN

SEQ ID NO: 146 - protein, 21 aa, Artificial Sequence
  Description of Artificial Sequence: Synthetic peptide
QGAEGRLSEGNFYDWFVQAVS

SEQ ID NO: 147 - protein, 21 aa, Artificial Sequence
  Description of Artificial Sequence: Synthetic peptide
PRLHMGSDMGDFYDWFVVQIA

SEQ ID NO: 148 - protein, 21 aa, Artificial Sequence
  Description of Artificial Sequence: Synthetic peptide
IVAGARHSEVNFYDWFVIQVR

SEQ ID NO: 149 - protein, 21 aa, Artificial Sequence
  Description of Artificial Sequence: Synthetic peptide
AELVGAGVRGNFYDWFVDQLV

SEQ ID NO: 150 - protein, 21 aa, Artificial Sequence
  Description of Artificial Sequence: Synthetic peptide
DSSRLWLGERNFYDWFVAQIS

SEQ ID NO: 151 - protein, 21 aa, Artificial Sequence
  Description of Artificial Sequence: Synthetic peptide
VGQVGRYVRSNFYDWFVQQAM

SEQ ID NO: 152 - protein, 21 aa, Artificial Sequence
  Description of Artificial Sequence: Synthetic peptide
RPQLVESGSKNFYDWFVQVVR

SEQ ID NO: 153 - protein, 21 aa, Artificial Sequence
  Description of Artificial Sequence: Synthetic peptide
RIHNQTERGGNFYDWFVHQLV

SEQ ID NO: 154 - protein, 21 aa, Artificial Sequence
  Description of Artificial Sequence: Synthetic peptide
EMYGDTSERVNFYDWFVSALQ

SEQ ID NO: 155 - protein, 21 aa, Artificial Sequence
  Description of Artificial Sequence: Synthetic peptide
RVGSGMEDLGNFYDWFVRQAQ

SEQ ID NO: 156 - protein, 21 aa, Artificial Sequence
  Description of Artificial Sequence: Synthetic peptide
KDPVTVSQGRNFYDWFVVQIQ

SEQ ID NO: 157 - protein, 22 aa, Artificial Sequence
  Description of Artificial Sequence: Synthetic peptide
DARDHGVWVMSNFYDWFVAQVS

SEQ ID NO: 158 - protein, 21 aa, Artificial Sequence
  Description of Artificial Sequence: Synthetic peptide
VATVHVGGGMNFYDWFVAQVG

SEQ ID NO: 159 - protein, 21 aa, Artificial Sequence
  Description of Artificial Sequence: Synthetic peptide
CADPGACSSLNFYDWFVQMRG

SEQ ID NO: 160 - protein, 21 aa, Artificial Sequence
  Description of Artificial Sequence: Synthetic peptide
NPTSVQQYGVNFYDWFVNVLS

SEQ ID NO: 161 - protein, 21 aa, Artificial Sequence
  Description of Artificial Sequence: Synthetic peptide
RPSLPEVRPGNFYDWFVQSVR

SEQ ID NO: 162 - protein, 21 aa, Artificial Sequence
  Description of Artificial Sequence: Synthetic peptide
SLQGADFQQGNFYDWFVSELA

SEQ ID NO: 163 - protein, 21 aa, Artificial Sequence
  Description of Artificial Sequence: Synthetic peptide
LSSRGRVTMRNFYDWFVAQVV

SEQ ID NO: 164 - protein, 21 aa, Artificial Sequence
  Description of Artificial Sequence: Synthetic peptide
HKSWTTMSPLNFYDWFVAQVE

SEQ ID NO: 165 - protein, 21 aa, Artificial Sequence
  Description of Artificial Sequence: Synthetic peptide
RPVIGGGGTRNFYDWFVAQMI

SEQ ID NO: 166 - protein, 21 aa, Artificial Sequence
  Description of Artificial Sequence: Synthetic peptide
YDQDPPYWGLNFYDWFVREVA

SEQ ID NO: 167 - protein, 39 aa, Artificial Sequence; identical to SEQ ID NO: 5
  Description of Artificial Sequence: Synthetic peptide

SEQ ID NO: 168 - protein, 39 aa, Artificial Sequence
  Description of Artificial Sequence: Synthetic peptide
QRGMLVRGRISHGAGKIAYEPPDCLGQKACAVNFYDWFV

SEQ ID NO: 169 - protein, 39 aa, Artificial Sequence
  Description of Artificial Sequence: Synthetic peptide
QRGMLLLGRISDDAGKVASEPSARRGQKVFAFNFYDWFV

SEQ ID NO: 170 - protein, 38 aa, Artificial Sequence
  Description of Artificial Sequence: Synthetic peptide
YRGILVLGRISEGAGKVASEPAARIGQKVFADFYDWFV

SEQ ID NO: 171 - protein, 39 aa, Artificial Sequence
  Description of Artificial Sequence: Synthetic peptide
QRGMLALGRISDGAGKVASEPPAGIGQKVFAFNFYDWFV

SEQ ID NO: 172 - protein, 39 aa, Artificial Sequence
  Description of Artificial Sequence: Synthetic peptide
FRGRLVLGHFSDGAGKVGSEPAARIGQKVFDVNFYDWFV

SEQ ID NO: 173 - protein, 39 aa, Artificial Sequence
  Description of Artificial Sequence: Synthetic peptide
YRGMLVLGRISDGAGKVASEPPARIGQEVFADNFYDWFV

SEQ ID NO: 174 - protein, 39 aa, Artificial Sequence
  Description of Artificial Sequence: Synthetic peptide
YRGMLVLGRISDGAGEVASEPPARIGQEVFALNFYDWFV

SEQ ID NO: 175 - protein, 39 aa, Artificial Sequence
  Description of Artificial Sequence: Synthetic peptide
VPWYAGSGSSSDGAGKVASEPPARIDQKVFAVNFYDWFV

SEQ ID NO: 176 - protein, 39 aa, Artificial Sequence
  Description of Artificial Sequence: Synthetic peptide
YRGQLVLGRISYGAGKVGCDPPARIGQKDWAVNFYDWFV

SEQ ID NO: 177 - protein, 39 aa, Artificial Sequence
  Description of Artificial Sequence: Synthetic peptide
QRGLLVLGRFSDGAGNVASEPPAGIGQEVFPVNFYDWFV

SEQ ID NO: 178 - protein, 39 aa, Artificial Sequence
  Description of Artificial Sequence: Synthetic peptide
QRGMLVLGRISDGAGKVAAEPPDCLGQKVCAVNFYDWFV

SEQ ID NO: 179 - protein, 39 aa, Artificial Sequence
  Description of Artificial Sequence: Synthetic peptide
QRGMRVLGRISDGAGKVASELPPRIGQKDFAVNFYDWFV

SEQ ID NO: 180 - protein, 39 aa, Artificial Sequence
  Description of Artificial Sequence: Synthetic peptide
QRGMLVLGSISDGAGKVAYEAPARIGQTVFAVNFYDWFV

SEQ ID NO: 181 - protein, 39 aa, Artificial Sequence
  Description of Artificial Sequence: Synthetic peptide
QPWCAGSGRIYDGACKVASEPPAHIGQEVFAVNFYDWFV

SEQ ID NO: 182 - protein, 39 aa, Artificial Sequence
  Description of Artificial Sequence: Synthetic peptide
QRGMLVLDRISDGAGKVASGPPARIGQNVLAVNFYDWFV

SEQ ID NO: 183 - protein, 39 aa, Artificial Sequence
  Description of Artificial Sequence: Synthetic peptide
YRGMLVVGRISDGTGKVASQPPARIGQKVFAVNFYDWFV

SEQ ID NO: 184 - protein, 39 aa, Artificial Sequence
  Description of Artificial Sequence: Synthetic peptide
YRGMLVLGRISDGAGKVASVPPAHIGQKVFAFNFYDWFV

SEQ ID NO: 185 - protein, 39 aa, Artificial Sequence
  Description of Artificial Sequence: Synthetic peptide
QHGMLVLGRVSVGAGKVPSEPQARIGHKVFDVNFYDWFV

SEQ ID NO: 186 - protein, 39 aa, Artificial Sequence
  Description of Artificial Sequence: Synthetic peptide
YSGYAGSGSFSDGAGKVASEPPARISQEVLADNFYDWFV

SEQ ID NO: 187 - protein, 39 aa, Artificial Sequence
  Description of Artificial Sequence: Synthetic peptide
YRGMLVLGRISDGAGKVASEPPARIGQKVSAVNFYDWFV

SEQ ID NO: 188 - protein, 39 aa, Artificial Sequence
  Description of Artificial Sequence: Synthetic peptide
YHGKLDLGRISVGVGKVASEPPARIGQKVFADNFYDWFV

SEQ ID NO: 189 - protein, 40 aa, Artificial Sequence
  Description of Artificial Sequence: Synthetic peptide
YRGQAGSGVGSLTVAGKVASDPPARIGQKVFADNFYDWFV

SEQ ID NO: 190 - protein, 39 aa, Artificial Sequence
  Description of Artificial Sequence: Synthetic peptide
HRGMLVLGRISEGAGNVDPEPPARIGQNVFAGNFYDWFV

SEQ ID NO: 191 - protein, 39 aa, Artificial Sequence
  Description of Artificial Sequence: Synthetic peptide
QRGMPVLGRISDGAGKVGSEPPARIARKVFPVNFYDWFI

SEQ ID NO: 192 - protein, 39 aa, Artificial Sequence
  Description of Artificial Sequence: Synthetic peptide
QGGLLVTGRISDGAGKVASEPPGGIGQKVFAGNFYDWFV

SEQ ID NO: 193 - protein, 39 aa, Artificial Sequence
  Description of Artificial Sequence: Synthetic peptide
YPWYGGSGTYLDGAGKVASEPPARIDQQVFAGNFYDWFV

SEQ ID NO: 194 - protein, 39 aa, Artificial Sequence
  Description of Artificial Sequence: Synthetic peptide
YRAMLVLRRISDVAGIVDSEPPTRIGQKVFAGNFYDWFV

SEQ ID NO: 195 - protein, 39 aa, Artificial Sequence
  Description of Artificial Sequence: Synthetic peptide
YRGMLVLGRISQGAGNVASEPSSRIGQKVFAGNFYDWFI

SEQ ID NO: 196 - protein, 39 aa, Artificial Sequence
  Description of Artificial Sequence: Synthetic peptide
YRGMLVLGRISDGAGKVDYEPPARIGQKVFAGNFYDWFV

SEQ ID NO: 197 - protein, 39 aa, Artificial Sequence
  Description of Artificial Sequence: Synthetic peptide
YRGMLGLGGISAGAGIVASEPPARVGQKVFAGNFYDWFV

SEQ ID NO: 198 - protein, 39 aa, Artificial Sequence
  Description of Artificial Sequence: Synthetic peptide
YRGILFQGRIPDGAGKVASEPPTRIGERVFAVNFYDWFV

SEQ ID NO: 199 - protein, 39 aa, Artificial Sequence
  Description of Artificial Sequence: Synthetic peptide
QGGMPVLGRISDGAGKVAFEPPARIGQKVFAGNFYDWFV

SEQ ID NO: 200 - protein, 39 aa, Artificial Sequence
  Description of Artificial Sequence: Synthetic peptide
YRGMLVLGRIQDGAGKVASEPPARIGQKVFTGNFYDWFV

SEQ ID NO: 201 - protein, 39 aa, Artificial Sequence
  Description of Artificial Sequence: Synthetic peptide
QRGMLVLGGVSDGAGKVASDPPASIGQNVFAVNFYDWFV

SEQ ID NO: 202 - protein, 39 aa, Artificial Sequence
  Description of Artificial Sequence: Synthetic peptide
YPGMLILDRISDGASKVVSEPPASIGQKVFAVNFYDWFV

SEQ ID NO: 203 - protein, 39 aa, Artificial Sequence
  Description of Artificial Sequence: Synthetic peptide
YRGMLVLDRISDGAGKVASEQPARIGQEVYAVNFYDWFV

SEQ ID NO: 204 - protein, 39 aa, Artificial Sequence
  Description of Artificial Sequence: Synthetic peptide
YRGMLDLGRISGGVGKVASESPARIGQKVYAVNFYDWFV

SEQ ID NO: 205 - protein, 32 aa, Artificial Sequence
  Description of Artificial Sequence: Synthetic peptide
QRGMMVLGRISDGAGEVASEKVFAVNFYDWFV

SEQ ID NO: 206 - protein, 39 aa, Artificial Sequence
  Description of Artificial Sequence: Synthetic peptide
QRGMLVLGRVSDGAGKVDSAPPARIGQKVFAGNFYDWFV

SEQ ID NO: 207 - protein, 39 aa, Artificial Sequence
  Description of Artificial Sequence: Synthetic peptide
QRGMLVLGRMSDGAGKVAFEPPARIGQRGFAGNFYDWFV

SEQ ID NO: 208 - protein, 39 aa, Artificial Sequence
  Description of Artificial Sequence: Synthetic peptide
QRGTLVLGRISDGAGKAASEPPARIGQNVFAVNFYDWFV

SEQ ID NO: 209 - protein, 39 aa, Artificial Sequence
  Description of Artificial Sequence: Synthetic peptide
QRGMLVLDRISDGAGKVAAEPPARIGQKVFALNFYDWFI

SEQ ID NO: 210 - protein, 39 aa, Artificial Sequence
  Description of Artificial Sequence: Synthetic peptide
QRGMLVLGRISDGAGEVASEPPARIGEKVYAVNFYDWFV

SEQ ID NO: 211 - protein, 39 aa, Artificial Sequence
  Description of Artificial Sequence: Synthetic peptide
QRGILVRGRISDGAGKVGSEPPARSGEKVFAVNFYDWFI

SEQ ID NO: 212 - protein, 39 aa, Artificial Sequence
  Description of Artificial Sequence: Synthetic peptide
QLGMVVLGRISDGSGKAASEPAARISQKVFAVNFYDWFV

SEQ ID NO: 213 - protein, 39 aa, Artificial Sequence
  Description of Artificial Sequence: Synthetic peptide
QRGMLVLGRISDGDGKVASEPPARIGQRVFAVNFYDWFV

SEQ ID NO: 214 - protein, 39 aa, Artificial Sequence
  Description of Artificial Sequence: Synthetic peptide
YRGMLVLGRSSDGAGKVAFERPARIGQTVFAVNFYDWFV

SEQ ID NO: 215 - protein, 39 aa, Artificial Sequence
  Description of Artificial Sequence: Synthetic peptide
  MOD_RES (16): Unknown amino acid; translation read-through at TAA stop codon
YRGMLVLGRISDGAGXVASEPPARIGRKVFAVNFYDWFV

SEQ ID NO: 216 - protein, 39 aa, Artificial Sequence
  Description of Artificial Sequence: Synthetic peptide
YRGMLVLGRISGGAGKAASERPARIGQKVSAVNFYDWFV

SEQ ID NO: 217 - protein, 39 aa, Artificial Sequence
  Description of Artificial Sequence: Synthetic peptide
YRGMMVQGRISDGAGKVASVSPVRIGQKVIAVNFYDWFV

SEQ ID NO: 218 - protein, 39 aa, Artificial Sequence
  Description of Artificial Sequence: Synthetic peptide
YRGRLGLGRISDVAGKVACDPSARIGQKVLPVNFYDWFV

SEQ ID NO: 219 - protein, 39 aa, Artificial Sequence
  Description of Artificial Sequence: Synthetic peptide
YRGMLVLGRISDGAGRVASEPQARIGQKVFAVNFYDWFV

SEQ ID NO: 220 - protein, 39 aa, Artificial Sequence
  Description of Artificial Sequence: Synthetic peptide
QGGMLVPGRISDGAGKVASQPPARIGPKGFAGNFYDWFV

SEQ ID NO: 221 - protein, 39 aa, Artificial Sequence
  Description of Artificial Sequence: Synthetic peptide
YRGMRVLGRISDGAGKVASEPPTHIGQKVFPVNFYDWFV

SEQ ID NO: 222 - protein, 39 aa, Artificial Sequence
  Description of Artificial Sequence: Synthetic peptide
YRGMLVLGRISDGAGKVGSEPAARIGQKVFALNFYDWFV

SEQ ID NO: 223 - protein, 40 aa, Artificial Sequence
  Description of Artificial Sequence: Synthetic peptide
YRGQGMVLGRISDGAGKVASEPPGRIGQKVFPVNFYDWFV

SEQ ID NO: 224 - protein, 39 aa, Artificial Sequence
  Description of Artificial Sequence: Synthetic peptide
YRGMLGLGRITGGAGKVASEPPDRIGQHVFVDNFYDWFV

SEQ ID NO: 225 - protein, 38 aa, Artificial Sequence
  Description of Artificial Sequence: Synthetic peptide
DGMLVLGRISDGAGNVASEAPARIGQKVFAVNFYDWFV

SEQ ID NO: 226 - protein, 39 aa, Artificial Sequence
  Description of Artificial Sequence: Synthetic peptide
YRGMRVRGRISDGAGKAASDPRARIGQTVLDVNFYDWFV

SEQ ID NO: 227 - protein, 39 aa, Artificial Sequence
  Description of Artificial Sequence: Synthetic peptide
YRGMWVLGRISYGAGKVAYEPPARMGQKGFAVNFYDWFV

SEQ ID NO: 228 - protein, 39 aa, Artificial Sequence
  Description of Artificial Sequence: Synthetic peptide
YRGMLVGGRIAGGAGIVASEPPARIGQKVFAVNFYDWFV

SEQ ID NO: 229 - protein, 39 aa, Artificial Sequence
  Description of Artificial Sequence: Synthetic peptide
YRGLLGLGGISDGAGKVASEPPARNGQKVFAVNFYDWFV

SEQ ID NO: 230 - protein, 39 aa, Artificial Sequence
  Description of Artificial Sequence: Synthetic peptide
YRGMLGLGRISAGAGKVASGAPARIGQEDFAVNFYDWFV

SEQ ID NO: 231 - protein, 39 aa, Artificial Sequence
  Description of Artificial Sequence: Synthetic peptide
YRGMLALGRISEGAGKVASEPPARIGQNVFAVNFYDWFV

SEQ ID NO: 232 - protein, 39 aa, Artificial Sequence
  Description of Artificial Sequence: Synthetic peptide
YRGMLVLGRISDGAGKVASEPPARIGQKVLAVNFYDWFV

SEQ ID NO: 233 - protein, 39 aa, Artificial Sequence
  Description of Artificial Sequence: Synthetic peptide
YPGMLVPGRISDGAGEGATDPPPRIGQKVFAFNFYDWFV

SEQ ID NO: 234 - protein, 39 aa, Artificial Sequence
  Description of Artificial Sequence: Synthetic peptide
YRGMLVPGRISDGAGKVAYEPPARIGQKIFAVNFYDWFV

SEQ ID NO: 235 - protein, 39 aa, Artificial Sequence
  Description of Artificial Sequence: Synthetic peptide
YRGVLVLGRVSDGVGKVASEPPAHRGQRVFGVNFYDWFV

SEQ ID NO: 236 - protein, 39 aa, Artificial Sequence
  Description of Artificial Sequence: Synthetic peptide
YRRMLVLGRISDGAANVASGPPDRIGQKVFAGNFYDWFV

SEQ ID NO: 237 - protein, 39 aa, Artificial Sequence
  Description of Artificial Sequence: Synthetic peptide
YRRMLALGRFSDVTGDVASEPPAHIGQKVVAVNFYDWFV

SEQ ID NO: 238 - protein, 39 aa, Artificial Sequence
  Description of Artificial Sequence: Synthetic peptide
YRGMVVRGRIFDGPGKVASEPRARIGQKVFAVNFYDWFV

SEQ ID NO: 239 - protein, 39 aa, Artificial Sequence
  Description of Artificial Sequence: Synthetic peptide
YRGMLILGRISDGAGKVASEPPARVGQDVVAVNFYDWFV

SEQ ID NO: 240 - protein, 39 aa, Artificial Sequence
  Description of Artificial Sequence: Synthetic peptide
YPGRLVGGRISDGVGKVASEPPGRIGQKVFAVNFYDWFV

SEQ ID NO: 241 - protein, 39 aa, Artificial Sequence
  Description of Artificial Sequence: Synthetic peptide
QRGLLVLGRIFDGAGKVASDPPARIGQKDFADNFYDWFV

SEQ ID NO: 242 - protein, 39 aa, Artificial Sequence
  Description of Artificial Sequence: Synthetic peptide
YRGMLVLGRISDGAGKVAFEPPARIGQNVFAVNFYDWFV

SEQ ID NO: 243 - protein, 39 aa, Artificial Sequence
  Description of Artificial Sequence: Synthetic peptide
  MOD_RES (16): Unknown amino acid; translation read-through at TAA stop codon
YRCMPVLGRISDGAGXVASDRPARIGQKVFAVNFYDWFV

SEQ ID NO: 244 - protein, 39 aa, Artificial Sequence
  Description of Artificial Sequence: Synthetic peptide
YRGRLVLGRISDGAGKVAAEPPASMDSKVFAGNFYDWFV

SEQ ID NO: 245 - protein, 16 aa, Artificial Sequence
  Description of Artificial Sequence: Synthetic peptide
GFREGNFYDWFVAQVT

SEQ ID NO: 246 - protein, 16 aa, Artificial Sequence
  Description of Artificial Sequence: Synthetic peptide
GFREGQRWYWFVAQVT

SEQ ID NO: 247 - protein, 16 aa, Artificial Sequence
  Description of Artificial Sequence: Synthetic peptide
GFREGYFYDWFLAQVT

SEQ ID NO: 248 - protein, 16 aa, Artificial Sequence
  Description of Artificial Sequence: Synthetic peptide
GFREGDFYEWFVAQVT

SEQ ID NO: 249 - protein, 16 aa, Artificial Sequence
  Description of Artificial Sequence: Synthetic peptide
GFREGQFYEWFAAQVT

SEQ ID NO: 250 - protein, 16 aa, Artificial Sequence
  Description of Artificial Sequence: Synthetic peptide
GFREGTFYDWFVAQVT

SEQ ID NO: 251 - protein, 16 aa, Artificial Sequence
  Description of Artificial Sequence: Synthetic peptide
GFREGNFYDWFEAQVT

SEQ ID NO: 252 - protein, 16 aa, Artificial Sequence
  Description of Artificial Sequence: Synthetic peptide
GFREGAFYDWFEAQVT

SEQ ID NO: 253 - protein, 16 aa, Artificial Sequence
  Description of Artificial Sequence: Synthetic peptide
GFREGAFYDWFVAQVT

SEQ ID NO: 254 - protein, 16 aa, Artificial Sequence
  Description of Artificial Sequence: Synthetic peptide
GFREGKFYQWFEAQVT

SEQ ID NO: 255 - protein, 16 aa, Artificial Sequence
  Description of Artificial Sequence: Synthetic peptide
GFREGDFYDWFQAQVT

SEQ ID NO: 256 - protein, 16 aa, Artificial Sequence
  Description of Artificial Sequence: Synthetic peptide
GFREGTFYEWFVAQVT

SEQ ID NO: 257 - protein, 16 aa, Artificial Sequence
  Description of Artificial Sequence: Synthetic peptide
GFREGNFYDWFVAQVT

SEQ ID NO: 258 - protein, 16 aa, Artificial Sequence
  Description of Artificial Sequence: Synthetic peptide
GFREGQFYEWFLAQVT

SEQ ID NO: 259 - protein, 16 aa, Artificial Sequence
  Description of Artificial Sequence: Synthetic peptide
GFREGQFYDWFLAQVT

SEQ ID NO: 260 - protein, 16 aa, Artificial Sequence
  Description of Artificial Sequence: Synthetic peptide
GFREGEFYDWFQAQVT

SEQ ID NO: 261 - protein, 16 aa, Artificial Sequence
  Description of Artificial Sequence: Synthetic peptide
GFREGQFYDWFRAQVT

SEQ ID NO: 262 - protein, 16 aa, Artificial Sequence
  Description of Artificial Sequence: Synthetic peptide
GFREGYFYEWFQAQVT

SEQ ID NO: 263 - protein, 16 aa, Artificial Sequence
  Description of Artificial Sequence: Synthetic peptide
GFREGDFYQWFEAQVT

SEQ ID NO: 264 - protein, 16 aa, Artificial Sequence
  Description of Artificial Sequence: Synthetic peptide
GFREGSFYGWFQAQVT

SEQ ID NO: 265 - protein, 16 aa, Artificial Sequence
  Description of Artificial Sequence: Synthetic peptide
GFREGSFYAWFQAQVT

SEQ ID NO: 266 - protein, 16 aa, Artificial Sequence
  Description of Artificial Sequence: Synthetic peptide
GFREGQFYDWFVAQVT

SEQ ID NO: 267 - protein, 16 aa, Artificial Sequence
  Description of Artificial Sequence: Synthetic peptide
GFREGIFYEWFVAQVT

SEQ ID NO: 268 - protein, 16 aa, Artificial Sequence
  Description of Artificial Sequence: Synthetic peptide
GFREGSFYEWFQAQVT

SEQ ID NO: 269 - protein, 16 aa, Artificial Sequence
  Description of Artificial Sequence: Synthetic peptide
GFREGNFYDWFAAQVT

SEQ ID NO: 270 - protein, 16 aa, Artificial Sequence
  Description of Artificial Sequence: Synthetic peptide
GFREGSFYDWFVAQVT

SEQ ID NO: 271 - protein, 16 aa, Artificial Sequence
  Description of Artificial Sequence: Synthetic peptide
GFREGDFYDWFVAQVT

SEQ ID NO: 272 - protein, 16 aa, Artificial Sequence
  Description of Artificial Sequence: Synthetic peptide
GFREGDFYQWFVAQVT

SEQ ID NO: 273 - protein, 16 aa, Artificial Sequence
  Description of Artificial Sequence: Synthetic peptide
GFREGGFYDWFVAQVT

SEQ ID NO: 274 - protein, 16 aa, Artificial Sequence
  Description of Artificial Sequence: Synthetic peptide
GFREGDFYGWFQAQVT

SEQ ID NO: 275 - protein, 16 aa, Artificial Sequence
  Description of Artificial Sequence: Synthetic peptide
GFREGVFYDWFVAQVT

SEQ ID NO: 276 - protein, 16 aa, Artificial Sequence
  Description of Artificial Sequence: Synthetic peptide
GFREGGFYEWFQAQVT

SEQ ID NO: 277 - protein, 16 aa, Artificial Sequence
  Description of Artificial Sequence: Synthetic peptide
GFREGSFYDWFQAQVT

SEQ ID NO: 278 - protein, 16 aa, Artificial Sequence
  Description of Artificial Sequence: Synthetic peptide
GFREGNFYEWFQAQVT

SEQ ID NO: 279 - protein, 16 aa, Artificial Sequence
  Description of Artificial Sequence: Synthetic peptide
GFREGKFYDWFLAQVT

SEQ ID NO: 280 - protein, 16 aa, Artificial Sequence
  Description of Artificial Sequence: Synthetic peptide
GFREGEFYEWFVAQVT

SEQ ID NO: 281 - protein, 16 aa, Artificial Sequence
  Description of Artificial Sequence: Synthetic peptide
GFREGRFYDWFVAQVT

SEQ ID NO: 282 - protein, 16 aa, Artificial Sequence
  Description of Artificial Sequence: Synthetic peptide
GFREGTFYDWFVAQVT

SEQ ID NO: 283 - protein, 16 aa, Artificial Sequence
  Description of Artificial Sequence: Synthetic peptide
GFREGEFYEWFAAQVT

SEQ ID NO: 284 - protein, 16 aa, Artificial Sequence
  Description of Artificial Sequence: Synthetic peptide
GFREGDFYEWFEAQVT

SEQ ID NO: 285 - protein, 16 aa, Artificial Sequence
  Description of Artificial Sequence: Synthetic peptide
  MOD_RES (12): Unknown amino acid
GFREGHFYDWFXAQVT

SEQ ID NO: 286 - protein, 16 aa, Artificial Sequence
  Description of Artificial Sequence: Synthetic peptide
GFREGEFYDWFVAQVT

SEQ ID NO: 287 - protein, 16 aa, Artificial Sequence
  Description of Artificial Sequence: Synthetic peptide
GFREGSFYDWFVAQVT

SEQ ID NO: 288 - protein, 16 aa, Artificial Sequence
  Description of Artificial Sequence: Synthetic peptide
GFREGSFYDWFGAQVT

SEQ ID NO: 289 - protein, 16 aa, Artificial Sequence
  Description of Artificial Sequence: Synthetic peptide
GFREGTFYDWFQAQVT

SEQ ID NO: 290 - protein, 16 aa, Artificial Sequence
  Description of Artificial Sequence: Synthetic peptide
GFREGNFYEWFTAQVT

SEQ ID NO: 291 - protein, 16 aa, Artificial Sequence
  Description of Artificial Sequence: Synthetic peptide
GFREGSFYNWFQAQVT

SEQ ID NO: 292 - protein, 16 aa, Artificial Sequence
  Description of Artificial Sequence: Synthetic peptide
GFREGNFYDWFVAQVT

SEQ ID NO: 293 - protein, 16 aa, Artificial Sequence
  Description of Artificial Sequence: Synthetic peptide
GFREGDFYDWFVAQVT

SEQ ID NO: 294 - protein, 16 aa, Artificial Sequence
  Description of Artificial Sequence: Synthetic peptide
GFREGAFYDWFAAQVT

SEQ ID NO: 295 - protein, 16 aa, Artificial Sequence
  Description of Artificial Sequence: Synthetic peptide
GFREGSFYDWFEAQVT

SEQ ID NO: 296 - protein, 16 aa, Artificial Sequence
  Description of Artificial Sequence: Synthetic peptide
GFREGSFYDWFAAQVT

SEQ ID NO: 297 - protein, 16 aa, Artificial Sequence
  Description of Artificial Sequence: Synthetic peptide
GFREGSFYEWFDAQVT

SEQ ID NO: 298 - protein, 16 aa, Artificial Sequence
  Description of Artificial Sequence: Synthetic peptide
GFREGAFYDWFEAQVT

SEQ ID NO: 299 - protein, 16 aa, Artificial Sequence
  Description of Artificial Sequence: Synthetic peptide
GFREGQFYDWFAAQVT

SEQ ID NO: 300 - protein, 16 aa, Artificial Sequence
  Description of Artificial Sequence: Synthetic peptide
GFREGNFYDWFAAQVT

SEQ ID NO: 301 - protein, 16 aa, Artificial Sequence
  Description of Artificial Sequence: Synthetic peptide
GFREGDFYDWFAAQVT

SEQ ID NO: 302 - protein, 16 aa, Artificial Sequence
  Description of Artificial Sequence: Synthetic peptide
GFREGSFYEWFEAQVT

SEQ ID NO: 303 - protein, 16 aa, Artificial Sequence
  Description of Artificial Sequence: Synthetic peptide
GFREGGFYDWFLAQVT

SEQ ID NO: 304 - protein, 16 aa, Artificial Sequence
  Description of Artificial Sequence: Synthetic peptide
GFREGGFYAWFAAQVT

SEQ ID NO: 305 - protein, 16 aa, Artificial Sequence
  Description of Artificial Sequence: Synthetic peptide
  MOD_RES (12): Unknown amino acid
GFREGGFYEWFXAQVT

SEQ ID NO: 306 - protein, 16 aa, Artificial Sequence
  Description of Artificial Sequence: Synthetic peptide
GFREGDFYDWFRAQVT

SEQ ID NO: 307 - protein, 16 aa, Artificial Sequence
  Description of Artificial Sequence: Synthetic peptide
GFREGSFYDWFVAQVT

SEQ ID NO: 308 - protein, 16 aa, Artificial Sequence
  Description of Artificial Sequence: Synthetic peptide
GFREGDFYGWFQAQVT

SEQ ID NO: 309 - protein, 16 aa, Artificial Sequence
  Description of Artificial Sequence: Synthetic peptide
GFREGGFYDWFQAQVT

SEQ ID NO: 310 - protein, 16 aa, Artificial Sequence
  Description of Artificial Sequence: Synthetic peptide
GFREGDFYDWFVAQVT

SEQ ID NO: 311 - protein, 16 aa, Artificial Sequence
  Description of Artificial Sequence: Synthetic peptide
GFREGDFYDWFQAQVT

SEQ ID NO: 312 - protein, 16 aa, Artificial Sequence
  Description of Artificial Sequence: Synthetic peptide
GFREGGFYDWFVAQVT

SEQ ID NO: 313 - protein, 16 aa, Artificial Sequence
  Description of Artificial Sequence: Synthetic peptide
GFREGDFYDWFAAQVT

SEQ ID NO: 314 - protein, 16 aa, Artificial Sequence
  Description of Artificial Sequence: Synthetic peptide
GFREGNFYDWFQAQVT

SEQ ID NO: 315 - protein, 16 aa, Artificial Sequence
  Description of Artificial Sequence: Synthetic peptide
GFREGNFYDWFLAQVT

SEQ ID NO: 316 - protein, 16 aa, Artificial Sequence
  Description of Artificial Sequence: Synthetic peptide
GFREGHFYDWFQAQVT

SEQ ID NO: 317 - protein, 16 aa, Artificial Sequence
  Description of Artificial Sequence: Synthetic peptide
GFREGQFYEWFEAQVT

SEQ ID NO: 318 - protein, 16 aa, Artificial Sequence
  Description of Artificial Sequence: Synthetic peptide
GFREGSFYEWFQAQVT

SEQ ID NO: 319 - protein, 16 aa, Artificial Sequence
  Description of Artificial Sequence: Synthetic peptide
GFREGDFYDWFLAQVT

SEQ ID NO: 320 - protein, 16 aa, Artificial Sequence
  Description of Artificial Sequence: Synthetic peptide
GFREGHFYDWFVAQVT

SEQ ID NO: 321 - protein, 16 aa, Artificial Sequence
  Description of Artificial Sequence: Synthetic peptide
GFREGQFYEWFVAQVT

SEQ ID NO: 322 - protein, 16 aa, Artificial Sequence
  Description of Artificial Sequence: Synthetic peptide
GFREGQFYDWFAAQVT

SEQ ID NO: 323 - protein, 16 aa, Artificial Sequence
  Description of Artificial Sequence: Synthetic peptide
GFREGQFYDWFVAQVT

SEQ ID NO: 324 - protein, 16 aa, Artificial Sequence
  Description of Artificial Sequence: Synthetic peptide
GFREGDFYQWFAAQVT

SEQ ID NO: 325 - protein, 16 aa, Artificial Sequence
  Description of Artificial Sequence: Synthetic peptide
GFREGNFYDWFVAQVT

SEQ ID NO: 326 - protein, 16 aa, Artificial Sequence
  Description of Artificial Sequence: Synthetic peptide
GFRDGSFYDWFVAQVT

SEQ ID NO: 327 - protein, 16 aa, Artificial Sequence
  Description of Artificial Sequence: Synthetic peptide
GFREGHFYEWFQAQVT

SEQ ID NO: 328 - protein, 16 aa, Artificial Sequence
  Description of Artificial Sequence: Synthetic peptide
GFREGDFYDWFSAQVT

SEQ ID NO: 329 - protein, 16 aa, Artificial Sequence
  Description of Artificial Sequence: Synthetic peptide
GFREGHFYDWFDAQVT

SEQ ID NO: 330 - protein, 16 aa, Artificial Sequence
  Description of Artificial Sequence: Synthetic peptide
GFREGYFYDWFKAQVT

SEQ ID NO: 331 - protein, 16 aa, Artificial Sequence
  Description of Artificial Sequence: Synthetic peptide
GFREGHFYDWFEAQVT

SEQ ID NO: 332 - protein, 16 aa, Artificial Sequence
  Description of Artificial Sequence: Synthetic peptide
GFREGDFYDWFEAQVT

SEQ ID NO: 333 - protein, 16 aa, Artificial Sequence
  Description of Artificial Sequence: Synthetic peptide
GFREGTFYDWFVAQVT

SEQ ID NO: 334 - protein, 16 aa, Artificial Sequence
  Description of Artificial Sequence: Synthetic peptide
GFREGDYYGWFEAQVT

SEQ ID NO: 335 - protein, 16 aa, Artificial Sequence
  Description of Artificial Sequence: Synthetic peptide
GFREGDFYAWFMAQVT

SEQ ID NO: 336 - protein, 16 aa, Artificial Sequence
  Description of Artificial Sequence: Synthetic peptide
GFREGNFYEWFLAQVT

SEQ ID NO: 337 - protein, 16 aa, Artificial Sequence
  Description of Artificial Sequence: Synthetic peptide
GFREGSFYDWFDAQVT

SEQ ID NO: 338 - protein, 16 aa, Artificial Sequence
  Description of Artificial Sequence: Synthetic peptide
GFREGNFYDQFVAQVT

SEQ ID NO: 339 - protein, 16 aa, Artificial Sequence
  Description of Artificial Sequence: Synthetic peptide
GFREGHFYEWFAAQVT

SEQ ID NO: 340 - protein, 16 aa, Artificial Sequence
  Description of Artificial Sequence: Synthetic peptide
GFREGNFYEWFVAQVT

SEQ ID NO: 341 - protein, 16 aa, Artificial Sequence
  Description of Artificial Sequence: Synthetic peptide
GFREGKFYDWFVAQVT

SEQ ID NO: 342 - protein, 16 aa, Artificial Sequence
  Description of Artificial Sequence: Synthetic peptide
GFREGMFDVQLLAQVT

SEQ ID NO: 343 - protein, 26 aa, Artificial Sequence
  Description of Artificial Sequence: Synthetic peptide
  MOD_RES (1)..(6): Variable amino acid
  MOD_RES (21)..(26): Variable amino acid
XXXXXXFHENFYDWFVRQVSXXXXXX

SEQ ID NO: 344 - protein, 21 aa, Artificial Sequence
  Description of Artificial Sequence: Synthetic peptide
VTFTSAVFHENFYDWFVRQVS

SEQ ID NO: 345 - protein, 26 aa, Artificial Sequence
  Description of Artificial Sequence: Synthetic peptide
TYKARFLHENFYDWFNRQVSQYFGRV

SEQ ID NO: 346 - protein, 24 aa, Artificial Sequence
  Description of Artificial Sequence: Synthetic peptide
QRLSLHEQFYDWFVGQVSPLGAGG

SEQ ID NO: 347 - protein, 26 aa, Artificial Sequence
  Description of Artificial Sequence: Synthetic peptide
GGGKVNFHEDFYGWFVQQFSGVGSDR

SEQ ID NO: 348 - protein, 26 aa, Artificial Sequence
  Description of Artificial Sequence: Synthetic peptide
LVGDAPFHEDFYDWFARQVFGCCQEQ

SEQ ID NO: 349 - protein, 26 aa, Artificial Sequence
  Description of Artificial Sequence: Synthetic peptide
TGAEVSFHENFYDWFDRQYSSWLDRD

SEQ ID NO: 350 - protein, 26 aa, Artificial Sequence
  Description of Artificial Sequence: Synthetic peptide
QPHSSRLHESFYDWFDRQVPWYALDR

SEQ ID NO: 351 - protein, 26 aa, Artificial Sequence
  Description of Artificial Sequence: Synthetic peptide
SRALAAVHEQFYDWFVRQVSGLDWGY

SEQ ID NO: 352 - protein, 26 aa, Artificial Sequence
  Description of Artificial Sequence: Synthetic peptide
QPKDGTLHENFYDWFVRQVSSSGWVG

SEQ ID NO: 353 - protein, 26 aa, Artificial Sequence
  Description of Artificial Sequence: Synthetic peptide
RGRLIQLHEDFYDWFLRQVSGMGGGS

SEQ ID NO: 354 - protein, 26 aa, Artificial Sequence
  Description of Artificial Sequence: Synthetic peptide
QRGAPKSDENFYDWFVRQVLRFGEND

SEQ ID NO: 355 - protein, 26 aa, Artificial Sequence
  Description of Artificial Sequence: Synthetic peptide
AARTSLFHEDFYEWFDRQVRQEGMWG

SEQ ID NO: 356 - protein, 26 aa, Artificial Sequence
  Description of Artificial Sequence: Synthetic peptide
GTSNHSLHENFYDWFVRQLSSVQSSG

SEQ ID NO: 357 - protein, 26 aa, Artificial Sequence
  Description of Artificial Sequence: Synthetic peptide
VSHVHLFHENFYDWFVRQLAAEGFSG

SEQ ID NO: 358 - protein, 26 aa, Artificial Sequence
  Description of Artificial Sequence: Synthetic peptide
GRQDSGLHEHFYDWFSRQVQGEVALG

SEQ ID NO: 359 - protein, 26 aa, Artificial Sequence
  Description of Artificial Sequence: Synthetic peptide
SNDERQFHETFYDWFVRQVSADGADR

SEQ ID NO: 360 - protein, 26 aa, Artificial Sequence
  Description of Artificial Sequence: Synthetic peptide
LSTEQRFHEKFYDWFVHQVSTSGGGT

SEQ ID NO: 361 - protein, 26 aa, Artificial Sequence
  Description of Artificial Sequence: Synthetic peptide
SLSREQFHENFYDWFARQVSELEGVV

SEQ ID NO: 362 - protein, 26 aa, Artificial Sequence
  Description of Artificial Sequence: Synthetic peptide
IPGRRSLHENFYDWFVRQVSPGGGSA

SEQ ID NO: 363 - protein, 26 aa, Artificial Sequence
  Description of Artificial Sequence: Synthetic peptide
TQKAQSLDEKFYDWFVRQVSGGGLTG

SEQ ID NO: 364 - protein, 26 aa, Artificial Sequence
  Description of Artificial Sequence: Synthetic peptide
VSQLSDFHENFYGWFARQIAGQAEWT

SEQ ID NO: 365 - protein, 26 aa, Artificial Sequence
  Description of Artificial Sequence: Synthetic peptide
NGTSQALHQNFYDWFAQQISGSEPGP

SEQ ID NO: 366 - protein, 26 aa, Artificial Sequence
  Description of Artificial Sequence: Synthetic peptide
VGQSVTFHGDFYDWFDRQLSGSQEFG

SEQ ID NO: 367 - protein, 26 aa, Artificial Sequence
  Description of Artificial Sequence: Synthetic peptide
TIDHHPLHEQFYDWFARQVSDLESLG

SEQ ID NO: 368 - protein, 26 aa, Artificial Sequence
  Description of Artificial Sequence: Synthetic peptide
PNVGYAFHENFYDWFIRQVSIEEKAG

SEQ ID NO: 369 - protein, 26 aa, Artificial Sequence
  Description of Artificial Sequence: Synthetic peptide
SRGSGVFHESFYNWFDRQVSEWIQFG

SEQ ID NO: 370 - protein, 26 aa, Artificial Sequence
  Description of Artificial Sequence: Synthetic peptide
QPVSGSVHERFYDWFVRQVSGSAGGG

SEQ ID NO: 371 - protein, 26 aa, Artificial Sequence
  Description of Artificial Sequence: Synthetic peptide
ASQLPPVYENFYEWFDRQVSLDAQRE

SEQ ID NO: 372 - protein, 26 aa, Artificial Sequence
  Description of Artificial Sequence: Synthetic peptide
VSGRGAFHENFYDWFVRQVFRDEQDT

SEQ ID NO: 373 - protein, 26 aa, Artificial Sequence
  Description of Artificial Sequence: Synthetic peptide
ARPPPTVHENFYDWFVRQVSETWRQD

SEQ ID NO: 374 - protein, 26 aa, Artificial Sequence
  Description of Artificial Sequence: Synthetic peptide
QGGDRLFHERFYDWFDRLVSSDSTGE

SEQ ID NO: 375 - protein, 26 aa, Artificial Sequence
  Description of Artificial Sequence: Synthetic peptide
QHIAAGLHENFYDWFIRQVSGVNVPA

SEQ ID NO: 376 - protein, 26 aa, Artificial Sequence
  Description of Artificial Sequence: Synthetic peptide
QPNDGLLHENFYDWFVRQVSNAVDGG

SEQ ID NO: 377 - protein, 26 aa, Artificial Sequence
  Description of Artificial Sequence: Synthetic peptide
PVEFTVYHDNFYDWFARQVSDGLGQF

SEQ ID NO: 378 - protein, 26 aa, Artificial Sequence
  Description of Artificial Sequence: Synthetic peptide
FCVQASIHENFYDWFVRQVAENQVFS

SEQ ID NO: 379 - protein, 26 aa, Artificial Sequence
  Description of Artificial Sequence: Synthetic peptide
GRPRGSFHENFYDWFARQVSGDGAGT

SEQ ID NO: 380 - protein, 26 aa, Artificial Sequence
  Description of Artificial Sequence: Synthetic peptide
IVGASLCHESFYDWFACQVTNLQSQG

SEQ ID NO: 381 - protein, 26 aa, Artificial Sequence
  Description of Artificial Sequence: Synthetic peptide
IGLRQMFHENFYDWFAREVSKEAGDG

SEQ ID NO: 382 - protein, 26 aa, Artificial Sequence
  Description of Artificial Sequence: Synthetic peptide
LGGAIEGHGNFYDWFVRQVSLDVGGE

SEQ ID NO: 383 - protein, 26 aa, Artificial Sequence
  Description of Artificial Sequence: Synthetic peptide
LNALQQLHENFYDWFGRQVSATPPGG

SEQ ID NO: 384 - protein, 26 aa, Artificial Sequence
  Description of Artificial Sequence: Synthetic peptide
VGNCDTFPENFYDWFACQVSELGGMN

SEQ ID NO: 385 - protein, 26 aa, Artificial Sequence
  Description of Artificial Sequence: Synthetic peptide
FSQDGNFHENFYDWFDRQLSLVGAGT

SEQ ID NO: 386 - protein, 26 aa, Artificial Sequence
  Description of Artificial Sequence: Synthetic peptide
PAGNRALHESFYDWFVRQVSEFQLGA

SEQ ID NO: 387 - protein, 26 aa, Artificial Sequence
  Description of Artificial Sequence: Synthetic peptide
DRLRARFNENFYDWFDRQVSGQGSMP

SEQ ID NO: 388 - protein, 26 aa, Artificial Sequence
  Description of Artificial Sequence: Synthetic peptide
VLGVAQFHDKFYDWFARQVSQLESAG

SEQ ID NO: 389 - protein, 26 aa, Artificial Sequence
  Description of Artificial Sequence: Synthetic peptide
GVVGGAFHEQFYDWFDRQVSAAFKGD

SEQ ID NO: 390 - protein, 26 aa, Artificial Sequence
  Description of Artificial Sequence: Synthetic peptide
DESEMRLHEQFYDWFARLVSLEGGSA

SEQ ID NO: 391 - protein, 26 aa, Artificial Sequence
  Description of Artificial Sequence: Synthetic peptide
EGGGVAIHENFYDWFDRQVSLQGWSD

SEQ ID NO: 392 - protein, 26 aa, Artificial Sequence
  Description of Artificial Sequence: Synthetic peptide
SRIVSRFHENFYDWFVRQVSGDAPVQ

SEQ ID NO: 393 - protein, 26 aa, Artificial Sequence
  Description of Artificial Sequence: Synthetic peptide
IPAGAQLHENFYDWFARQVSGEDGGA

SEQ ID NO: 394 - protein, 26 aa, Artificial Sequence
  Description of Artificial Sequence: Synthetic peptide
GSSAAGFDEQFYDWFDRQVSEAFRDG

SEQ ID NO: 395 - protein, 26 aa, Artificial Sequence
  Description of Artificial Sequence: Synthetic peptide
RLALRTFHQDFYDWFVRQVAAEDTDP

SEQ ID NO: 396 - protein, 26 aa, Artificial Sequence
  Description of Artificial Sequence: Synthetic peptide
QGSFAVLHENFYDWFARQVSGVEGLA

SEQ ID NO: 397 - protein, 26 aa, Artificial Sequence
  Description of Artificial Sequence: Synthetic peptide
QGNMSALHENFYDWFVRQVSEADRVD

SEQ ID NO: 398 - protein, 26 aa, Artificial Sequence
  Description of Artificial Sequence: Synthetic peptide
VAYPALLHEQFYDWFVRQVSAVAGTT

SEQ ID NO: 399 - protein, 26 aa, Artificial Sequence
  Description of Artificial Sequence: Synthetic peptide
PDTINSQHKNFYDWFVRQVSGVGTSS

SEQ ID NO: 400 - protein, 26 aa, Artificial Sequence
  Description of Artificial Sequence: Synthetic peptide
SEDVDSRHENFYDWFVRQVSGIGLQD

SEQ ID NO: 401 - protein, 26 aa, Artificial Sequence
  Description of Artificial Sequence: Synthetic peptide
PAPADAFDHNFYDWFARQLSATTTIQ

SEQ ID NO: 402 - protein, 26 aa, Artificial Sequence
  Description of Artificial Sequence: Synthetic peptide
MVQRISIHENFYDWFVRQISGSAVPP

SEQ ID NO: 403 - protein, 26 aa, Artificial Sequence
  Description of Artificial Sequence: Synthetic peptide
GNVRGQFHGQFYDWFARQVSGSEGDA

SEQ ID NO: 404 - protein, 26 aa, Artificial Sequence
  Description of Artificial Sequence: Synthetic peptide
PDAEKQFHETFYGWFVRQISEDSANS

SEQ ID NO: 405 - protein, 26 aa, Artificial Sequence
  Description of Artificial Sequence: Synthetic peptide
FGRGVHCDENFYDWFVCQVSGALLEG

SEQ ID NO: 406 - protein, 26 aa, Artificial Sequence
  Description of Artificial Sequence: Synthetic peptide
ETPLTELHEQFYDWFVRQVSGFPGGV

SEQ ID NO: 407 - protein, 26 aa, Artificial Sequence
  Description of Artificial Sequence: Synthetic peptide
QHRGPHFHEDFYDWFVRQVSSAVPSD

SEQ ID NO: 408 - protein, 26 aa, Artificial Sequence
  Description of Artificial Sequence: Synthetic peptide
RQDPGLFHDNFYDWFDRLVSAWDGQE

SEQ ID NO: 409 - protein, 26 aa, Artificial Sequence
  Description of Artificial Sequence: Synthetic peptide
QAAVGVCNKDFYAWFACQVREDFAKA

SEQ ID NO: 410 - protein, 26 aa, Artificial Sequence
  Description of Artificial Sequence: Synthetic peptide
RNWNLQFNENFYDWFDRQVSALRGGG

SEQ ID NO: 411 - protein, 26 aa, Artificial Sequence
  Description of Artificial Sequence: Synthetic peptide
RSEQYRFHENFYEWFDRQVSRMGLLG

SEQ ID NO: 412 - protein, 26 aa, Artificial Sequence
  Description of Artificial Sequence: Synthetic peptide
GAGGRDFDEDFYDWFVRQVSGQVTSG

SEQ ID NO: 413 - protein, 26 aa, Artificial Sequence
  Description of Artificial Sequence: Synthetic peptide
SPEGNLVHDQFYDWFVRQLSSTSAGT

SEQ ID NO: 414 - protein, 26 aa, Artificial Sequence
  Description of Artificial Sequence: Synthetic peptide
QGGLGDFDEDFYDWFARQVSRRDRAD

SEQ ID NO: 415 - protein, 26 aa, Artificial Sequence
  Description of Artificial Sequence: Synthetic peptide
LSQGVGFQENFYEWFERQVSGWDGRD

SEQ ID NO: 416 - protein, 26 aa, Artificial Sequence
  Description of Artificial Sequence: Synthetic peptide
VFERSRCHDNFYDWFFCQVSGQADGG

SEQ ID NO: 417 - protein, 26 aa, Artificial Sequence
  Description of Artificial Sequence: Synthetic peptide
LLASRAFHENFYDWFARQVSGTQPPG

SEQ ID NO: 418 - protein, 26 aa, Artificial Sequence
  Description of Artificial Sequence: Synthetic peptide
VPDAQIFHESFYDWFVRQASAGGPAD

SEQ ID NO: 419 - protein, 26 aa, Artificial Sequence
  Description of Artificial Sequence: Synthetic peptide
ANQMGRFHDNFYDWFDRQVSRYERGT

SEQ ID NO: 420 - protein, 26 aa, Artificial Sequence
  Description of Artificial Sequence: Synthetic peptide
PSRKDGLHQSFYDWFARQVQDMEGRA

SEQ ID NO: 421 - protein, 26 aa, Artificial Sequence
  Description of Artificial Sequence: Synthetic peptide
QAVTRRFHENFYDWFARQVSEEGGWS

SEQ ID NO: 422 - protein, 26 aa, Artificial Sequence
  Description of Artificial Sequence: Synthetic peptide
GYAVGQYQANFYDWFVRQVDGMSNGG

SEQ ID NO: 423 - protein, 26 aa, Artificial Sequence
  Description of Artificial Sequence: Synthetic peptide
GHQRDLLHESFYDWFVRQVSEAEGGG

SEQ ID NO: 424 - protein, 26 aa, Artificial Sequence
  Description of Artificial Sequence: Synthetic peptide
DRPSSFIHENFYEWFARQVSQSGSSG

SEQ ID NO: 425 - protein, 26 aa, Artificial Sequence
  Description of Artificial Sequence: Synthetic peptide
ERTAETLHEQFYDWFVRQVSAMDGES

SEQ ID NO: 426 - protein, 26 aa, Artificial Sequence
  Description of Artificial Sequence: Synthetic peptide
LTSQLLSHEDFYDWFVRQVSGVGGSG

SEQ ID NO: 427 - protein, 26 aa, Artificial Sequence
  Description of Artificial Sequence: Synthetic peptide
PDRSDRLDDNFYDWFVRQVSQVINED

SEQ ID NO: 428 - protein, 26 aa, Artificial Sequence
  Description of Artificial Sequence: Synthetic peptide
RAGGVGLHDNFYDWFVRQVSGGDSGP

SEQ ID NO: 429 - protein, 26 aa, Artificial Sequence
  Description of Artificial Sequence: Synthetic peptide
ADCYVQLHENFYDWFRRQVCNLQEGM

SEQ ID NO: 430 - protein, 26 aa, Artificial Sequence
  Description of Artificial Sequence: Synthetic peptide
RQGHAGFHDNFYDWFVRQVSGSTPQV

SEQ ID NO: 431 - protein, 21 aa, Artificial Sequence
  Description of Artificial Sequence: Synthetic peptide
VTFTSAVFHENFYDWFVRQVS

SEQ ID NO: 432 - protein, 26 aa, Artificial Sequence
  Description of Artificial Sequence: Synthetic peptide
GIISQSCPESFYDWFAGQVSDPWWCW

SEQ ID NO: 433 - protein, 26 aa, Artificial Sequence
  Description of Artificial Sequence: Synthetic peptide
VGRASGFPENFYDWFGRQLSLQSGEQ

SEQ ID NO: 434 - protein, 26 aa, Artificial Sequence
  Description of Artificial Sequence: Synthetic peptide
VGYQGQGDENFYDWFIRQVSGRLGVQ

SEQ ID NO: 435 - protein, 26 aa, Artificial Sequence
  Description of Artificial Sequence: Synthetic peptide
SACQFDCHENFYDWFARQVSGGAAYG

SEQ ID NO: 436 - protein, 26 aa, Artificial Sequence
  Description of Artificial Sequence: Synthetic peptide
SAAQLFFQESFYDWFLRQVAESSQPN

SEQ ID NO: 437 - protein, 26 aa, Artificial Sequence
  Description of Artificial Sequence: Synthetic peptide
AVRATRFDEAFYDWFVRQISDGQGNK

SEQ ID NO: 438 - protein, 26 aa, Artificial Sequence
  Description of Artificial Sequence: Synthetic peptide
VNQSGSIHENFYDWFERQVSHQRGVR

SEQ ID NO: 439 - protein, 26 aa, Artificial Sequence
  Description of Artificial Sequence: Synthetic peptide
APDPSDFQEIFYDWFVRQVSRMPGGG

SEQ ID NO: 440 - protein, 25 aa, Artificial Sequence
  Description of Artificial Sequence: Synthetic peptide
SSCDGAGHESFYEWFVRQVSGCRSV

SEQ ID NO: 441 - protein, 26 aa, Artificial Sequence
  Description of Artificial Sequence: Synthetic peptide
RAGSSDFHEDFYEWFVRQVSLSLKGK

SEQ ID NO: 442 - protein, 26 aa, Artificial Sequence
  Description of Artificial Sequence: Synthetic peptide
QAVQPGFHEEFYDWFVRQVSTGVGGG

SEQ ID NO: 443 - protein, 26 aa, Artificial Sequence
  Description of Artificial Sequence: Synthetic peptide
SSIGGGFHENFYDWFSRQLSQSPPLK

SEQ ID NO: 444 - protein, 26 aa, Artificial Sequence
  Description of Artificial Sequence: Synthetic peptide
QSPVGSSHEDFYDWFFRQVAQSGAHQ

SEQ ID NO: 445 - protein, 26 aa, Artificial Sequence
  Description of Artificial Sequence: Synthetic peptide
NYRRQVFNGNFYDWFDRQVFSLVTPG

SEQ ID NO: 446 - protein, 26 aa, Artificial Sequence
  Description of Artificial Sequence: Synthetic peptide
TLDGGSFEEQFYDWFVRQLSYRTNPD

SEQ ID NO: 447 - protein, 26 aa, Artificial Sequence
  Description of Artificial Sequence: Synthetic peptide
FYVQQWGHENFYDWFDRQVSQSGGAG

SEQ ID NO: 448 - protein, 26 aa, Artificial Sequence
  Description of Artificial Sequence: Synthetic peptide
LRRQAPVEENFYDWFVRQVSGDRVGG

SEQ ID NO: 449 - protein, 26 aa, Artificial Sequence
  Description of Artificial Sequence: Synthetic peptide
RCGRELYHSTFYDWFDRQVAGRTCPS

SEQ ID NO: 450 - protein, 26 aa, Artificial Sequence
  Description of Artificial Sequence: Synthetic peptide
CCLLCRFQQNFYDWFVCQGISRLRPL

SEQ ID NO: 451 - protein, 26 aa, Artificial Sequence
  Description of Artificial Sequence: Synthetic peptide
PPLASDLDVQFYGWFVQQVSPPGRGG

SEQ ID NO: 452 - protein, 25 aa, Artificial Sequence
  Description of Artificial Sequence: Synthetic peptide
GAPVDQLHEDFYDWFVRQVSQAATG

SEQ ID NO: 453 - protein, 26 aa, Artificial Sequence
  Description of Artificial Sequence: Synthetic peptide
RSASGSLPEQFYDWFVRQVSLSGTDK

SEQ ID NO: 454 - protein, 26 aa, Artificial Sequence
  Description of Artificial Sequence: Synthetic peptide
SRVTTVFHENFYDWFVRQLSDSAISG

SEQ ID NO: 455 - protein, 26 aa, Artificial Sequence
  Description of Artificial Sequence: Synthetic peptide
DERGGKFREDFYDWFVRQVSESRFGQ

SEQ ID NO: 456 - protein, 26 aa, Artificial Sequence
  Description of Artificial Sequence: Synthetic peptide
RGAVAGFHDQFYDWFDRQVSRVHKFG

SEQ ID NO: 457 - protein, 26 aa, Artificial Sequence
  Description of Artificial Sequence: Synthetic peptide
AICDAGFHEHFYDWFALQVSDCGRQS

SEQ ID NO: 458 - protein, 26 aa, Artificial Sequence
  Description of Artificial Sequence: Synthetic peptide
LGYQEPFQQNFYDWFVRQVSGAENAG

SEQ ID NO: 459 - protein, 26 aa, Artificial Sequence
  Description of Artificial Sequence: Synthetic peptide
WRGHGTFHEDFYDWFVRQVSGSGSST

SEQ ID NO: 460 - protein, 26 aa, Artificial Sequence
  Description of Artificial Sequence: Synthetic peptide
GGRVGVLHENFYDWFDRQVSLRGADG

SEQ ID NO: 461 - protein, 26 aa, Artificial Sequence
  Description of Artificial Sequence: Synthetic peptide
CNLTAGFHEQFYHWFAIQVCGDAENA

SEQ ID NO: 462 - protein, 26 aa, Artificial Sequence
  Description of Artificial Sequence: Synthetic peptide
ERGEDMFHENFYDWFVRQISGRQGGG

SEQ ID NO: 463 - protein, 26 aa, Artificial Sequence
  Description of Artificial Sequence: Synthetic peptide
TNQGVGFYDSFYGWFVRQIQYGVDSG

SEQ ID NO: 464 - protein, 26 aa, Artificial Sequence
  Description of Artificial Sequence: Synthetic peptide
HLADGQFHEKFYDWFERQISSRCNDC

SEQ ID NO: 465 - protein, 26 aa, Artificial Sequence
  Description of Artificial Sequence: Synthetic peptide
QTFGKSLHENFYDWFVRQVSREEGGD

SEQ ID NO: 466 - protein, 26 aa, Artificial Sequence
  Description of Artificial Sequence: Synthetic peptide
FRTLAAQHDSFYDWFDRQVSGAAGER

SEQ ID NO: 467 - protein, 26 aa, Artificial Sequence
  Description of Artificial Sequence: Synthetic peptide
SASTHQFHENFYDWFVRQVSGAQKIL

SEQ ID NO: 468 - protein, 21 aa, Artificial Sequence
  Description of Artificial Sequence: Synthetic peptide
  MOD_RES (1)..(6): Variable amino acid
  MOD_RES (9)..(10): Variable amino acid
  MOD_RES (13): Variable amino acid
  MOD_RES (16)..(21): Variable amino acid
XXXXXXFHXXFYXWFXXXXXX

SEQ ID NO: 469 - protein, 21 aa, Artificial Sequence
  Description of Artificial Sequence: Synthetic peptide
VTFTSAVFHENFYDWFVRQVS

SEQ ID NO: 470 - protein, 20 aa, Artificial Sequence
  Description of Artificial Sequence: Synthetic peptide
  MOD_RES (19): Unknown amino acid; translation read-through at TGA stop codon
QSDSGTVHDRFYGWFRDTXA

SEQ ID NO: 471 - protein, 21 aa, Artificial Sequence
  Description of Artificial Sequence: Synthetic peptide
WTDVDGFHSGFYRWFQNQWER

SEQ ID NO: 472 - protein, 21 aa, Artificial Sequence
  Description of Artificial Sequence: Synthetic peptide
VASGHVLHGQFYRWFVDQFAL

SEQ ID NO: 473 - protein, 21 aa, Artificial Sequence
  Description of Artificial Sequence: Synthetic peptide
QARVGNVHQQFYEWFREVMQG

SEQ ID NO: 474 - protein, 21 aa, Artificial Sequence
  Description of Artificial Sequence: Synthetic peptide
VGDFCVSHDCFYGWFLRESMQ

SEQ ID NO: 475 - protein, 20 aa, Artificial Sequence
  Description of Artificial Sequence: Synthetic peptide
SGSRPVFHEQFYEWFVDQLG

SEQ ID NO: 476 - protein, 21 aa, Artificial Sequence
  Description of Artificial Sequence: Synthetic peptide
QFSAGAFHGDFYGWFRALYNG

SEQ ID NO: 477 - protein, 21 aa, Artificial Sequence
  Description of Artificial Sequence: Synthetic peptide
SRFDERLHHQFYEWFRVLNEP

SEQ ID NO: 478 - protein, 21 aa, Artificial Sequence
  Description of Artificial Sequence: Synthetic peptide
DSVNSDLHRAFYGWFAEQWRA

SEQ ID NO: 479 - protein, 21 aa, Artificial Sequence
  Description of Artificial Sequence: Synthetic peptide
GSVDREIHGPFYSWFSEQLWG

SEQ ID NO: 480 - protein, 21 aa, Artificial Sequence
  Description of Artificial Sequence: Synthetic peptide
SAKTPVLHDGFYMWFEAQSES

SEQ ID NO: 481 - protein, 21 aa, Artificial Sequence
  Description of Artificial Sequence: Synthetic peptide
LVVGRRFHQSFYDWFVAAAGG

SEQ ID NO: 482 - protein, 21 aa, Artificial Sequence
  Description of Artificial Sequence: Synthetic peptide
IMWPCTFQDPFYCWFQTEQGR

SEQ ID NO: 483 - protein, 21 aa, Artificial Sequence
  Description of Artificial Sequence: Synthetic peptide
VVGPLDIHERFYGWFHQQGGA

SEQ ID NO: 484 - protein, 21 aa, Artificial Sequence
  Description of Artificial Sequence: Synthetic peptide
VVPKAGFHEAFYEWFRRQDRD

SEQ ID NO: 485 - protein, 21 aa, Artificial Sequence
  Description of Artificial Sequence: Synthetic peptide
QSFVTSVHTRFYAWFASALEM

SEQ ID NO: 486 - protein, 21 aa, Artificial Sequence
  Description of Artificial Sequence: Synthetic peptide
SRGLGLYHSGFYGWFERQFNQ

SEQ ID NO: 487 - protein, 21 aa, Artificial Sequence
  Description of Artificial Sequence: Synthetic peptide
GADTGAVHRRFYLWFEQLSGG

SEQ ID NO: 488 - protein, 21 aa, Artificial Sequence
  Description of Artificial Sequence: Synthetic peptide
PGNRPTFHAEFYRWFREAQGS

SEQ ID NO: 489 - protein, 21 aa, Artificial Sequence
  Description of Artificial Sequence: Synthetic peptide
VAVAWGLHESFYAWFENQFSD

SEQ ID NO: 490 - protein, 21 aa, Artificial Sequence
  Description of Artificial Sequence: Synthetic peptide
GFNTGTFHDQFYYWFWEAAGG

SEQ ID NO: 491 - protein, 21 aa, Artificial Sequence
  Description of Artificial Sequence: Synthetic peptide
GDGLTAFHQGFYEWFDIQMYG

SEQ ID NO: 492 - protein, 21 aa, Artificial Sequence
  Description of Artificial Sequence: Synthetic peptide
VGVNRQFHTRFYAWFDEQLGG

SEQ ID NO: 493 - protein, 21 aa, Artificial Sequence
  Description of Artificial Sequence: Synthetic peptide
GPRGQRLHDAFYSWFDALRVN

SEQ ID NO: 494 - protein, 21 aa, Artificial Sequence
  Description of Artificial Sequence: Synthetic peptide
LGTLAVFHELFYGWFERQLGG

SEQ ID NO: 495 - protein, 21 aa, Artificial Sequence
  Description of Artificial Sequence: Synthetic peptide
LGGYCGFNCQFYRWFDNLADR

SEQ ID NO: 496 - protein, 21 aa, Artificial Sequence
  Description of Artificial Sequence: Synthetic peptide
FSGWADYQSGFYQWFAEELAN

SEQ ID NO: 497 - protein, 21 aa, Artificial Sequence
  Description of Artificial Sequence: Synthetic peptide
WGPFSVFDESFYRWFAQASDD

SEQ ID NO: 498 - protein, 21 aa, Artificial Sequence
  Description of Artificial Sequence: Synthetic peptide
PRNEGLVHGLFYDWFQRALSG

SEQ ID NO: 499 - protein, 21 aa, Artificial Sequence
  Description of Artificial Sequence: Synthetic peptide
DEGGAPLDVMFYRWFEQAVRG

SEQ ID NO: 500 - protein, 21 aa, Artificial Sequence
  Description of Artificial Sequence: Synthetic peptide
QSGNRGSHGAFYSWFRDVLAN

SEQ ID NO: 501 - protein, 21 aa, Artificial Sequence
  Description of Artificial Sequence: Synthetic peptide
MRQRDGFNSSFYGWFAAALGE

SEQ ID NO: 502 - protein, 21 aa, Artificial Sequence
  Description of Artificial Sequence: Synthetic peptide
SEERKKVHSQFYSWFDRQLLG

SEQ ID NO: 503 - protein, 21 aa, Artificial Sequence
  Description of Artificial Sequence: Synthetic peptide
PSPNAPFHGGFYDWFDWVQGS

SEQ ID NO: 504 - protein, 21 aa, Artificial Sequence
  Description of Artificial Sequence: Synthetic peptide
FHRPGSFNTNFYQWFDDQMNQ

SEQ ID NO: 505 - protein, 21 aa, Artificial Sequence
  Description of Artificial Sequence: Synthetic peptide
SDDSSTLNGRFYTWFHMQLLD

SEQ ID NO: 506 - protein, 21 aa, Artificial Sequence
  Description of Artificial Sequence: Synthetic peptide
QRGGGGFHEGFYSWFRSQSLL

SEQ ID NO: 507 - protein, 21 aa, Artificial Sequence
  Description of Artificial Sequence: Synthetic peptide
SGSRPVFHEQFYEWFVDQLGL

SEQ ID NO: 508 - protein, 21 aa, Artificial Sequence
  Description of Artificial Sequence: Synthetic peptide
GGSSQAFHGAFYEWFSAQLRG

SEQ ID NO: 509 - protein, 21 aa, Artificial Sequence
  Description of Artificial Sequence: Synthetic peptide
AFVSERVNQRFYDWFRDQMRS

SEQ ID NO: 510 - protein, 21 aa, Artificial Sequence
  Description of Artificial Sequence: Synthetic peptide
VRHPTRFHDEFYRWFTEQLTT

SEQ ID NO: 511 - protein, 21 aa, Artificial Sequence
  Description of Artificial Sequence: Synthetic peptide
ARLLNIFDRGFYNWFQRQLDE

SEQ ID NO: 512 - protein, 21 aa, Artificial Sequence
  Description of Artificial Sequence: Synthetic peptide
PSLSSNLHESFYRWFDQLVST

SEQ ID NO: 513 - protein, 21 aa, Artificial Sequence
  Description of Artificial Sequence: Synthetic peptide
FAFGLGFHQGFYDWFAHQLEG

SEQ ID NO: 514 - protein, 21 aa, Artificial Sequence
  Description of Artificial Sequence: Synthetic peptide
VSATVMLHREFYDWFGLQLLD

SEQ ID NO: 515 - protein, 21 aa, Artificial Sequence
  Description of Artificial Sequence: Synthetic peptide
GGVSGVLHDRFYSWFERQLAG

SEQ ID NO: 516 - protein, 21 aa, Artificial Sequence
  Description of Artificial Sequence: Synthetic peptide
GLGIASFHEGFYSWFTAQLGA

SEQ ID NO: 517 - protein, 21 aa, Artificial Sequence
  Description of Artificial Sequence: Synthetic peptide
RVDAAALNAGFYEWFRGVIQG

SEQ ID NO: 518 - protein, 21 aa, Artificial Sequence
  Description of Artificial Sequence: Synthetic peptide
GGAGRSFHDAFYEWFERQMAG

SEQ ID NO: 519 - protein, 21 aa, Artificial Sequence
  Description of Artificial Sequence: Synthetic peptide
EGARQGFHARFYSWFAQQLAL

SEQ ID NO: 520 - protein, 21 aa, Artificial Sequence
  Description of Artificial Sequence: Synthetic peptide
VLLPGVVHGGFYDWFSRQLSS

SEQ ID NO: 521 - protein, 21 aa, Artificial Sequence
  Description of Artificial Sequence: Synthetic peptide
GALSDRYNNVFYDWFREQLLG

SEQ ID NO: 522 - protein, 21 aa, Artificial Sequence
  Description of Artificial Sequence: Synthetic peptide
PDSFMSLHQRFYSWFQAQVGT

SEQ ID NO: 523 - protein, 21 aa, Artificial Sequence
  Description of Artificial Sequence: Synthetic peptide
RVYKANFHNEFYGWFREQLLG

SEQ ID NO: 524 - protein, 21 aa, Artificial Sequence
  Description of Artificial Sequence: Synthetic peptide
HSGMRDVHARFYSWFSEQLSG

SEQ ID NO: 525 - protein, 21 aa, Artificial Sequence
  Description of Artificial Sequence: Synthetic peptide
ARLLERFQDPFYEWFETLMGD

SEQ ID NO: 526 - protein, 21 aa, Artificial Sequence
  Description of Artificial Sequence: Synthetic peptide
RNSSGNFHDKFYNWFEAQLKG

SEQ ID NO: 527 - protein, 21 aa, Artificial Sequence
  Description of Artificial Sequence: Synthetic peptide
GSMSPVFNDQFYGWFRDLVDE

SEQ ID NO: 528 - protein, 21 aa, Artificial Sequence
  Description of Artificial Sequence: Synthetic peptide
SCTGRQFDGCFYAWFEDQLVG

SEQ ID NO: 529 - protein, 21 aa, Artificial Sequence
  Description of Artificial Sequence: Synthetic peptide
GIAVQSLHDSFYRWFDNALGS

SEQ ID NO: 530 - protein, 21 aa, Artificial Sequence
  Description of Artificial Sequence: Synthetic peptide
IGPPGSLHRGFYDWFAEQVEA

SEQ ID NO: 531 - protein, 21 aa, Artificial Sequence
  Description of Artificial Sequence: Synthetic peptide
GAAGISFHRGFYDWFAAQVRD

SEQ ID NO: 532 - protein, 21 aa, Artificial Sequence
  Description of Artificial Sequence: Synthetic peptide
GVDVTDFHKDFYSWFQRQLNG

SEQ ID NO: 533 - protein, 21 aa, Artificial Sequence
  Description of Artificial Sequence: Synthetic peptide
WAGRAGIHGGFYEWFNRQLRG

SEQ ID NO: 534 - protein, 21 aa, Artificial Sequence
  Description of Artificial Sequence: Synthetic peptide
LGQLAAFHLGFYEWFSEAVAA

SEQ ID NO: 535 - protein, 21 aa, Artificial Sequence
  Description of Artificial Sequence: Synthetic peptide
VHSVSRLNVGFYQWFQDQLSG

SEQ ID NO: 536 - protein, 21 aa, Artificial Sequence
  Description of Artificial Sequence: Synthetic peptide
LGLMAIFDRGFYGWFEQQLSG

SEQ ID NO: 537 - protein, 21 aa, Artificial Sequence
  Description of Artificial Sequence: Synthetic peptide
VARGSSLHDDFYEWFASQLRT

SEQ ID NO: 538 - protein, 21 aa, Artificial Sequence
  Description of Artificial Sequence: Synthetic peptide
LGYIGALNTQFYSWFADLVGS

SEQ ID NO: 539 - protein, 21 aa, Artificial Sequence
  Description of Artificial Sequence: Synthetic peptide
EDSRLRLHEGFYGWFRKQLGD

SEQ ID NO: 540 - protein, 21 aa, Artificial Sequence
  Description of Artificial Sequence: Synthetic peptide
GRDNMKFHSGFYDWFTQQLAG

SEQ ID NO: 541 - protein, 21 aa, Artificial Sequence
  Description of Artificial Sequence: Synthetic peptide
AGVMGGFHQEFYLWFERALSN

SEQ ID NO: 542 - protein, 21 aa, Artificial Sequence
  Description of Artificial Sequence: Synthetic peptide
AGHVGQVYDGFYGWFREQLGA

SEQ ID NO: 543 - protein, 21 aa, Artificial Sequence
  Description of Artificial Sequence: Synthetic peptide
FVQNIGFDYDFYGWFVREVEK

SEQ ID NO: 544 - protein, 21 aa, Artificial Sequence
  Description of Artificial Sequence: Synthetic peptide
PVGIGGLHRAFYQWFQSQVDA

SEQ ID NO: 545 - protein, 21 aa, Artificial Sequence
  Description of Artificial Sequence: Synthetic peptide
GSRQEADHQAFYDWFNLVLGV

SEQ ID NO: 546 - protein, 21 aa, Artificial Sequence
  Description of Artificial Sequence: Synthetic peptide
AGGRKPFHDDFYGWFRDQLAE

SEQ ID NO: 547 - protein, 21 aa, Artificial Sequence
  Description of Artificial Sequence: Synthetic peptide
DLASHGFHDAFYNWFSVQLNS

SEQ ID NO: 548 - protein, 21 aa, Artificial Sequence
  Description of Artificial Sequence: Synthetic peptide
GSNGGGVHGQFYAWFVEALSG

SEQ ID NO: 549 - protein, 21 aa, Artificial Sequence
  Description of Artificial Sequence: Synthetic peptide
RGRASTFHDGFYGWFSQQLRF

SEQ ID NO: 550 - protein, 21 aa, Artificial Sequence
  Description of Artificial Sequence: Synthetic peptide
SPARRVSHHDFYGWFAKQLES

SEQ ID NO: 551 - protein, 21 aa, Artificial Sequence
  Description of Artificial Sequence: Synthetic peptide
SSDVGAFHSAFYDWFKAQLSG

SEQ ID NO: 552 - protein, 21 aa, Artificial Sequence
  Description of Artificial Sequence: Synthetic peptide
PTVHRAFDDLFYGWFAKQVED

SEQ ID NO: 553 - protein, 21 aa, Artificial Sequence
  Description of Artificial Sequence: Synthetic peptide
SSNTVGLDERFYAWFVDQLGA

SEQ ID NO: 554 - protein, 21 aa, Artificial Sequence
  Description of Artificial Sequence: Synthetic peptide
PGAAEGFHSAFYDWFAQAVSG

SEQ ID NO: 555 - protein, 21 aa, Artificial Sequence
  Description of Artificial Sequence: Synthetic peptide
MRSEASFHVEFYSWFEEQLRS

SEQ ID NO: 556 - protein, 21 aa, Artificial Sequence
  Description of Artificial Sequence: Synthetic peptide
VSRYGGQQDGFYHWFSDLLKG

SEQ ID NO: 557 - protein, 21 aa, Artificial Sequence
  Description of Artificial Sequence: Synthetic peptide
RPSSGGLHYGFYHWFRVQEEM

SEQ ID NO: 558 - protein, 21 aa, Artificial Sequence
  Description of Artificial Sequence: Synthetic peptide
SNIEEHFHMQFYRWFSDALGN

SEQ ID NO: 559 - protein, 21 aa, Artificial Sequence
  Description of Artificial Sequence: Synthetic peptide
ANDCLGLHAGFYGWFACQLGG

SEQ ID NO: 560 - protein, 21 aa, Artificial Sequence
  Description of Artificial Sequence: Synthetic peptide
TGHRLGLDEQFYWWFRDALSG

SEQ ID NO: 561 - protein, 21 aa, Artificial Sequence
  Description of Artificial Sequence: Synthetic peptide
VLTSNTLHQRFYSWFAAARRE

SEQ ID NO: 562 - protein, 21 aa, Artificial Sequence
  Description of Artificial Sequence: Synthetic peptide
CVAQGGFQSSFYCWFAGLDID

SEQ ID NO: 563 - protein, 21 aa, Artificial Sequence
  Description of Artificial Sequence: Synthetic peptide
NGQSSRFHTAFYDWFAAQLSG

SEQ ID NO: 564 - protein, 21 aa, Artificial Sequence
  Description of Artificial Sequence: Synthetic peptide
SVPRGTVHDAFYQWFREVALG

SEQ ID NO: 565 - protein, 21 aa, Artificial Sequence
  Description of Artificial Sequence: Synthetic peptide
GARGSTFHDQFYEWFWVQLGD

SEQ ID NO: 566 - protein, 21 aa, Artificial Sequence
  Description of Artificial Sequence: Synthetic peptide
PPGMNGFHTSFYSWFVDQLGD

SEQ ID NO: 567 - protein, 21 aa, Artificial Sequence
  Description of Artificial Sequence: Synthetic peptide
AVGTLGYHSGFYRWFERQLGG

SEQ ID NO: 568 - protein, 21 aa, Artificial Sequence
  Description of Artificial Sequence: Synthetic peptide
ELQARGVHRNFYRWFEAQVSG

SEQ ID NO: 569 - protein, 21 aa, Artificial Sequence
  Description of Artificial Sequence: Synthetic peptide
HRVARAFHEQFYDWFEKAVSG

SEQ ID NO: 570 - protein, 21 aa, Artificial Sequence
  Description of Artificial Sequence: Synthetic peptide
GAMEPDYHRSFYQWFAAALGE

SEQ ID NO: 571 - protein, 21 aa, Artificial Sequence
  Description of Artificial Sequence: Synthetic peptide
CPDRQSVDDRFYNWFADALAS

SEQ ID NO: 572 - protein, 21 aa, Artificial Sequence
  Description of Artificial Sequence: Synthetic peptide
GGAQISFHERFYQWFLQEAAG

SEQ ID NO: 573 - protein, 21 aa, Artificial Sequence
  Description of Artificial Sequence: Synthetic peptide
HKRGIVQHGAFYAWFDSLLSG

SEQ ID NO: 574 - protein, 21 aa, Artificial Sequence
  Description of Artificial Sequence: Synthetic peptide
QASDNRSDGQFYLWFEKLLSS

SEQ ID NO: 575 - protein, 21 aa, Artificial Sequence
  Description of Artificial Sequence: Synthetic peptide
DRGRMGVDEGFYNWFARQMQE

SEQ ID NO: 576 - protein, 21 aa, Artificial Sequence
  Description of Artificial Sequence: Synthetic peptide
VTFTSAVFHENFYDWFVRQVS

SEQ ID NO: 577 - protein, 21 aa, Artificial Sequence
  Description of Artificial Sequence: Synthetic peptide
TASQECFDDGFYGWFRAWRCT

SEQ ID NO: 578 - protein, 21 aa, Artificial Sequence
  Description of Artificial Sequence: Synthetic peptide
SLDWRWSEEPFYRWFQRALAG

SEQ ID NO: 579 - protein, 21 aa, Artificial Sequence
  Description of Artificial Sequence: Synthetic peptide
CMSLSDCHRKFYGWFKSQGGE

SEQ ID NO: 580 - protein, 21 aa, Artificial Sequence
  Description of Artificial Sequence: Synthetic peptide
LALCRRSPGSFYGWFQAAVGC

SEQ ID NO: 581 - protein, 21 aa, Artificial Sequence
  Description of Artificial Sequence: Synthetic peptide
PRSATMSDGGFYWWFASQLGL

SEQ ID NO: 582 - protein, 21 aa, Artificial Sequence
  Description of Artificial Sequence: Synthetic peptide
  MOD_RES (14): Unknown amino acid; translation read-through at TGA stop codon
LRRSSVFHDPFYEXISRLVGG

SEQ ID NO: 583 - protein, 21 aa, Artificial Sequence
  Description of Artificial Sequence: Synthetic peptide
ARLQQQFHGGFYEWFRAQVSP

SEQ ID NO: 584 - protein, 21 aa, Artificial Sequence
  Description of Artificial Sequence: Synthetic peptide
AQLDNLCHEPFYSWFCAVTRE

SEQ ID NO: 585 - protein, 21 aa, Artificial Sequence
  Description of Artificial Sequence: Synthetic peptide
WTCDTAFHQDFYQWFCDKLGV

SEQ ID NO: 586 - protein, 21 aa, Artificial Sequence
  Description of Artificial Sequence: Synthetic peptide
GKEGFGLDRDFYWWFREQLGP

SEQ ID NO: 587 - protein, 21 aa, Artificial Sequence
  Description of Artificial Sequence: Synthetic peptide
GRAPSSFDCDFYCWFRNQVQS

SEQ ID NO: 588 - protein, 21 aa, Artificial Sequence
  Description of Artificial Sequence: Synthetic peptide
DVEAETQHRLFYAWFLSQLGS

SEQ ID NO: 589 - protein, 21 aa, Artificial Sequence
  Description of Artificial Sequence: Synthetic peptide
ISVTAVFHDGFYGWFNEQVSK

SEQ ID NO: 590 - protein, 21 aa, Artificial Sequence
  Description of Artificial Sequence: Synthetic peptide
NSEHGRLDVDFYGWFARVIQQ

SEQ ID NO: 591 - protein, 21 aa, Artificial Sequence
  Description of Artificial Sequence: Synthetic peptide
GPLGDGCQDGFYGWFMCQVST

SEQ ID NO: 592 - protein, 21 aa, Artificial Sequence
  Description of Artificial Sequence: Synthetic peptide
KRSAYNFHDPFYDWFRMQLSG

SEQ ID NO: 593 - protein, 21 aa, Artificial Sequence
  Description of Artificial Sequence: Synthetic peptide
ASEPGGYLDPFYGWFREQLRA

SEQ ID NO: 594 - protein, 21 aa, Artificial Sequence
  Description of Artificial Sequence: Synthetic peptide
NRGDGGVHSGFYNWFRLQLSG

SEQ ID NO: 595 - protein, 21 aa, Artificial Sequence
  Description of Artificial Sequence: Synthetic peptide
ASKGSSLHNDFYGWFAQQLAR

SEQ ID NO: 596 - protein, 21 aa, Artificial Sequence
  Description of Artificial Sequence: Synthetic peptide
ANVSMWIQVGFYDWFDAQLRQ

SEQ ID NO: 597 - protein, 21 aa, Artificial Sequence
  Description of Artificial Sequence: Synthetic peptide
RTSPGSLHDPFYDWFQQQLGG

SEQ ID NO: 598 - protein, 21 aa, Artificial Sequence
  Description of Artificial Sequence: Synthetic peptide
PGVMSSFHGGFYSWFREQLNG

SEQ ID NO: 599 - protein, 21 aa, Artificial Sequence
  Description of Artificial Sequence: Synthetic peptide
CLANSEDHDSFYGWFCQALGG

SEQ ID NO: 600 - protein, 21 aa, Artificial Sequence
  Description of Artificial Sequence: Synthetic peptide
GGSMGGMHGSFYEWFALQLRS

SEQ ID NO: 601 - protein, 21 aa, Artificial Sequence
  Description of Artificial Sequence: Synthetic peptide
RPQGGSIHAGFYQWFRDAVAG

SEQ ID NO: 602 - protein, 21 aa, Artificial Sequence
  Description of Artificial Sequence: Synthetic peptide
GALSSLFDAAFYDWFNRQLEG

SEQ ID NO: 603 - protein, 21 aa, Artificial Sequence
  Description of Artificial Sequence: Synthetic peptide
KVDLRGFHDGFYGWFARQLAG

SEQ ID NO: 604 - protein, 21 aa, Artificial Sequence
  Description of Artificial Sequence: Synthetic peptide
CSGLQRCHDSFYSWFESVVRE

SEQ ID NO: 605 - protein, 21 aa, Artificial Sequence
  Description of Artificial Sequence: Synthetic peptide
DSLGISFHEGFYDWFRRQLDM

SEQ ID NO: 606 - protein, 18 aa, Artificial Sequence
  Description of Artificial Sequence: Synthetic peptide
SGVFNGTFYDWFRIQLGE

SEQ ID NO: 607 - protein, 21 aa, Artificial Sequence
  Description of Artificial Sequence: Synthetic peptide
GYREMRSDLGFYQWFRDQLGL

SEQ ID NO: 608 - protein, 21 aa, Artificial Sequence
  Description of Artificial Sequence: Synthetic peptide
SVFMQHDHVGFYAWFRSLMEE

SEQ ID NO: 609 - protein, 21 aa, Artificial Sequence
  Description of Artificial Sequence: Synthetic peptide
FRHITEVDRSFYGWFVEQLRG

SEQ ID NO: 610 - protein, 21 aa, Artificial Sequence
  Description of Artificial Sequence: Synthetic peptide
WAGGSDVDGSFYDWFQRLLAS

SEQ ID NO: 611 - protein, 21 aa, Artificial Sequence
  Description of Artificial Sequence: Synthetic peptide
GLQNVSFHSGFYEWFARQVSQ

SEQ ID NO: 612 - protein, 21 aa, Artificial Sequence
  Description of Artificial Sequence: Synthetic peptide
SRVSDPYHVGFYQWFEEVVRG

SEQ ID NO: 613 - protein, 21 aa, Artificial Sequence
  Description of Artificial Sequence: Synthetic peptide
MGGATFFHTGFYDWFAAQLQH

SEQ ID NO: 614 - protein, 21 aa, Artificial Sequence
  Description of Artificial Sequence: Synthetic peptide
RPASRPFHSGFYQWFADQLSH

SEQ ID NO: 615 - protein, 21 aa, Artificial Sequence
  Description of Artificial Sequence: Synthetic peptide
GLAPGNFHEDFYRWFQEQTLG

SEQ ID NO: 616 - protein, 21 aa, Artificial Sequence
  Description of Artificial Sequence: Synthetic peptide
TAAISDFNSLFYGWFEQLLSS

SEQ ID NO: 617 - protein, 21 aa, Artificial Sequence
  Description of Artificial Sequence: Synthetic peptide
LDEDLPQHAGFYGWFAEALGV

SEQ ID NO: 618 - protein, 21 aa, Artificial Sequence
  Description of Artificial Sequence: Synthetic peptide
ASHKSAFDDNFYRWFSMQLRD

SEQ ID NO: 619 - protein, 21 aa, Artificial Sequence
  Description of Artificial Sequence: Synthetic peptide
HTGAGDLHGAFYNWFLEQLGG

SEQ ID NO: 620 - protein, 21 aa, Artificial Sequence
  Description of Artificial Sequence: Synthetic peptide
RRGRDGFHGGFYDWFAAQLSD

SEQ ID NO: 621 - protein, 21 aa, Artificial Sequence
  Description of Artificial Sequence: Synthetic peptide
GNFREAFHADFYSWFERQLQS

SEQ ID NO: 622 - protein, 21 aa, Artificial Sequence
  Description of Artificial Sequence: Synthetic peptide
RDTLPAFHQHFYQWFEKQVSA

SEQ ID NO: 623 - protein, 21 aa, Artificial Sequence
  Description of Artificial Sequence: Synthetic peptide
ERETAAFGQAFYQWFRDQIAG

SEQ ID NO: 624 - protein, 21 aa, Artificial Sequence
  Description of Artificial Sequence: Synthetic peptide
WGEGGGFYDWFYDQLGWEPSH

SEQ ID NO: 625 - protein, 21 aa, Artificial Sequence
  Description of Artificial Sequence: Synthetic peptide
SLVAADLHEGFYGWFRSQLGG

SEQ ID NO: 626 - protein, 21 aa, Artificial Sequence
  Description of Artificial Sequence: Synthetic peptide
TSEVGDFHAEFYSWFEIQLGR

SEQ ID NO: 627 - protein, 21 aa, Artificial Sequence
  Description of Artificial Sequence: Synthetic peptide
TGADGLLHARFYAWFEEQLRE

SEQ ID NO: 628 - protein, 21 aa, Artificial Sequence
  Description of Artificial Sequence: Synthetic peptide
RRSDSSLHRSFYDWFSVQLLN

SEQ ID NO: 629 - protein, 21 aa, Artificial Sequence
  Description of Artificial Sequence: Synthetic peptide
SESKYLLHSGFYGWFEAQLRG

SEQ ID NO: 630 - protein, 21 aa, Artificial Sequence
  Description of Artificial Sequence: Synthetic peptide
HGVIRADHTGFYGWFSKQLSD

SEQ ID NO: 631 - protein, 21 aa, Artificial Sequence
  Description of Artificial Sequence: Synthetic peptide
  MOD_RES (5): Unknown amino acid
LINAXVFRRGFYAWFEEQVSK

SEQ ID NO: 632 - protein, 21 aa, Artificial Sequence
  Description of Artificial Sequence: Synthetic peptide
LQRYIGFHDPFYDWFSRALSG

SEQ ID NO: 633 - protein, 21 aa, Artificial Sequence
  Description of Artificial Sequence: Synthetic peptide
MRTAELFHVGFYDWFDAQLMD

SEQ ID NO: 634 - protein, 21 aa, Artificial Sequence
  Description of Artificial Sequence: Synthetic peptide
WAPPDALHGQFYRWFQRQLDQ

SEQ ID NO: 635 - protein, 21 aa, Artificial Sequence
  Description of Artificial Sequence: Synthetic peptide
AVHAATFHDDFYRWFEQVVGS

SEQ ID NO: 636 - protein, 21 aa, Artificial Sequence
  Description of Artificial Sequence: Synthetic peptide
FDAVHGFDGGFYGWFKRELQR

SEQ ID NO: 637 - protein, 21 aa, Artificial Sequence
  Description of Artificial Sequence: Synthetic peptide
QAGGMEFHGAFYNWFLQQLSG

SEQ ID NO: 638 - protein, 21 aa, Artificial Sequence
  Description of Artificial Sequence: Synthetic peptide
GRSVSRMNAEFYQWFGHQLAA

SEQ ID NO: 639 - protein, 21 aa, Artificial Sequence
  Description of Artificial Sequence: Synthetic peptide
AAVNSLFHDEFYLWFQDQLDG

SEQ ID NO: 640 - protein, 21 aa, Artificial Sequence
  Description of Artificial Sequence: Synthetic peptide
QLGMDWFHADFYEWFLAQLPS

SEQ ID NO: 641 - protein, 21 aa, Artificial Sequence
  Description of Artificial Sequence: Synthetic peptide
RLAGSGIHEGFYGWFVDQLLA

SEQ ID NO: 642 - protein, 21 aa, Artificial Sequence
  Description of Artificial Sequence: Synthetic peptide
GREIGGVHDGFYDWFRQQSEQ

SEQ ID NO: 643 - protein, 21 aa, Artificial Sequence
  Description of Artificial Sequence: Synthetic peptide
VRSEQRFDSSFYQWFNDLLMS

SEQ ID NO: 644 - protein, 21 aa, Artificial Sequence
  Description of Artificial Sequence: Synthetic peptide
QSPYGFFHDGFYRWFLQQTGM

SEQ ID NO: 645 - protein, 21 aa, Artificial Sequence
  Description of Artificial Sequence: Synthetic peptide
FQCGAAFHVDFYRWFTCQEQF

SEQ ID NO: 646 - protein, 21 aa, Artificial Sequence
  Description of Artificial Sequence: Synthetic peptide
GAFGSEFHEQFYRWFEDALSF

SEQ ID NO: 647 - protein, 21 aa, Artificial Sequence
  Description of Artificial Sequence: Synthetic peptide
EHTSYQIHRQFYEWFDRALGR

SEQ ID NO: 648 - protein, 21 aa, Artificial Sequence
  Description of Artificial Sequence: Synthetic peptide
SGTAADLHSRFYGWFALQARE

SEQ ID NO: 649 - protein, 21 aa, Artificial Sequence
  Description of Artificial Sequence: Synthetic peptide
EGFGVLFHGQFYRWFQLQLDG

SEQ ID NO: 650 - protein, 21 aa, Artificial Sequence
  Description of Artificial Sequence: Synthetic peptide
QQSAGHPHSSFYLWFSELLGA

SEQ ID NO: 651 - protein, 21 aa, Artificial Sequence
  Description of Artificial Sequence: Synthetic peptide
YLQRAGFHRSFYGWFDQALRD

SEQ ID NO: 652 - protein, 21 aa, Artificial Sequence
  Description of Artificial Sequence: Synthetic peptide
MWLWATLHSDFYSWFEQVVSG

SEQ ID NO: 653 - protein, 21 aa, Artificial Sequence
  Description of Artificial Sequence: Synthetic peptide
GANALGFKDRFYEWFAAQLWD

SEQ ID NO: 654 - protein, 21 aa, Artificial Sequence
  Description of Artificial Sequence: Synthetic peptide
GSGLYVFHWGFYDWFEQQMGG

SEQ ID NO: 655 - protein, 21 aa, Artificial Sequence
  Description of Artificial Sequence: Synthetic peptide
LDKGWGFDLQFYRWFEAATRA

SEQ ID NO: 656 - protein, 21 aa, Artificial Sequence
  Description of Artificial Sequence: Synthetic peptide
QRSAVEFHADFYDWFLRLLTP

SEQ ID NO: 657 - protein, 21 aa, Artificial Sequence
  Description of Artificial Sequence: Synthetic peptide
DQRMGSFHGEFYRWFEETLLS

SEQ ID NO: 658 - protein, 21 aa, Artificial Sequence
  Description of Artificial Sequence: Synthetic peptide
GRFYGWFQDAIDQLMPWGFDP

SEQ ID NO: 659 - protein, 21 aa, Artificial Sequence
  Description of Artificial Sequence: Synthetic peptide
IQGWEPFYGWFDDVVAQMFEE

SEQ ID NO: 660 - protein, 17 aa, Artificial Sequence
  Description of Artificial Sequence: Synthetic peptide
RYGRWGLAQQFYDWFDR

SEQ ID NO: 661 - protein, 17 aa, Artificial Sequence
  Description of Artificial Sequence: Synthetic peptide
RGRLGSLSTQFYNWFAE

SEQ ID NO: 662 - protein, 21 aa, Artificial Sequence
  Description of Artificial Sequence: Synthetic peptide
ASAYTPFYQWFADVVSEYMQQ

SEQ ID NO: 663 - protein, 21 aa, Artificial Sequence
  Description of Artificial Sequence: Synthetic peptide
PYRMEGTEKWNFYDWFVAQLQ

SEQ ID NO: 664 - protein, 21 aa, Artificial Sequence
  Description of Artificial Sequence: Synthetic peptide
SAVHFQFYKWFDNLLPVPLSA

SEQ ID NO: 665 - protein, 21 aa, Artificial Sequence
  Description of Artificial Sequence: Synthetic peptide
VPVNKSFYRWFQLVLGGSDDW

SEQ ID NO: 666 - protein, 21 aa, Artificial Sequence
  Description of Artificial Sequence: Synthetic peptide
QSPRASFYGWFDDVLRAAGVV

SEQ ID NO: 667 - protein, 21 aa, Artificial Sequence
  Description of Artificial Sequence: Synthetic peptide
TGFYEWFYEQLHSRMLPNPLD

SEQ ID NO: 668 - protein, 21 aa, Artificial Sequence
  Description of Artificial Sequence: Synthetic peptide
RRGVGGFYGWFSQQLQGMGVA

SEQ ID NO: 669 - protein, 21 aa, Artificial Sequence
  Description of Artificial Sequence: Synthetic peptide
SSQDRRFYRWFEQAIVGGRDG

SEQ ID NO: 670 - protein, 21 aa, Artificial Sequence
  Description of Artificial Sequence: Synthetic peptide
TRGQLGFYNWFQQALSTSGMG

SEQ ID NO: 671 - protein, 21 aa, Artificial Sequence
  Description of Artificial Sequence: Synthetic peptide
CADLNAFYQWFCGVLDRGSDH

SEQ ID NO: 672 - protein, 21 aa, Artificial Sequence
  Description of Artificial Sequence: Synthetic peptide
TLIQDQFYWWFSDLLSAEPGD

SEQ ID NO: 673 - protein, 21 aa, Artificial Sequence
  Description of Artificial Sequence: Synthetic peptide
IDQLDAFYRWFDGVMLGMGDP

SEQ ID NO: 674 - protein, 20 aa, Artificial Sequence
  Description of Artificial Sequence: Synthetic peptide
RGGGTFYEWFESALRKHGAG

SEQ ID NO: 675 - protein, 21 aa, Artificial Sequence
  Description of Artificial Sequence: Synthetic peptide
RGLDQDFYRWFQNLVGVEYDR

SEQ ID NO: 676 - protein, 21 aa, Artificial Sequence
  Description of Artificial Sequence: Synthetic peptide
MQGHRGFYGWFARVLEQDRGW

SEQ ID NO: 677 - protein, 21 aa, Artificial Sequence
  Description of Artificial Sequence: Synthetic peptide
ERLHLRFYEWFDTVIGQDGSD

SEQ ID NO: 678 - protein, 21 aa, Artificial Sequence
  Description of Artificial Sequence: Synthetic peptide
MHVQSDFYHWFQSLLGQGGPD

SEQ ID NO: 679 - protein, 21 aa, Artificial Sequence
  Description of Artificial Sequence: Synthetic peptide
TMGTQGFYRWFQNVVKEHLSG

SEQ ID NO: 680 - protein, 21 aa, Artificial Sequence
  Description of Artificial Sequence: Synthetic peptide
ITHNRGFYSWFLDVVQGGAGA

SEQ ID NO: 681 - protein, 21 aa, Artificial Sequence
  Description of Artificial Sequence: Synthetic peptide
VRRDAGFYQWFADILTQLDFE

SEQ ID NO: 682 - protein, 21 aa, Artificial Sequence
  Description of Artificial Sequence: Synthetic peptide
MQLQDEFYNWFRGIMLNDGQD

SEQ ID NO: 683 - protein, 21 aa, Artificial Sequence
  Description of Artificial Sequence: Synthetic peptide
GIRSSGFYQWFDRVLAGVGDG

SEQ ID NO: 684 - protein, 21 aa, Artificial Sequence
  Description of Artificial Sequence: Synthetic peptide
ANLNSQFYSWFASVTGEASPS

SEQ ID NO: 685 - protein, 21 aa, Artificial Sequence
  Description of Artificial Sequence: Synthetic peptide
QSPRASFYGWFDDVLRAAGVV

SEQ ID NO: 686 - protein, 21 aa, Artificial Sequence
  Description of Artificial Sequence: Synthetic peptide
MQRNQGFYSWFDDLVSSTVGV

SEQ ID NO: 687 - protein, 21 aa, Artificial Sequence
  Description of Artificial Sequence: Synthetic peptide
ASGFDPFYAWFLEQLRVANGS

SEQ ID NO: 688 - protein, 21 aa, Artificial Sequence
  Description of Artificial Sequence: Synthetic peptide
SGTPYGFYRWFQSALASATSG

SEQ ID NO: 689 - protein, 21 aa, Artificial Sequence
  Description of Artificial Sequence: Synthetic peptide
QGVEGGFYEWFDRAMGDVRPW

SEQ ID NO: 690 - protein, 21 aa, Artificial Sequence
  Description of Artificial Sequence: Synthetic peptide
DNMSGGFYRWFAQVVADSGGD

SEQ ID NO: 691 - protein, 21 aa, Artificial Sequence
  Description of Artificial Sequence: Synthetic peptide
RGTDDTFYGWFDQLLQGWCDD

SEQ ID NO: 692 - protein, 21 aa, Artificial Sequence
  Description of Artificial Sequence: Synthetic peptide
TVDHTQFYDWFSRVLGESGSA

SEQ ID NO: 693 - protein, 21 aa, Artificial Sequence
  Description of Artificial Sequence: Synthetic peptide
GRQDREFYYWFELQAGGMDGD

SEQ ID NO: 694 - protein, 21 aa, Artificial Sequence
  Description of Artificial Sequence: Synthetic peptide
RLLLGGFYEWFDQVLKETKEV

SEQ ID NO: 695 - protein, 21 aa, Artificial Sequence
  Description of Artificial Sequence: Synthetic peptide
GVLSTGFYEWFALQLHGLAAG

SEQ ID NO: 696 - protein, 21 aa, Artificial Sequence
  Description of Artificial Sequence: Synthetic peptide
PAVGQSFYGWFEAVLRGSKAG

SEQ ID NO: 697 - protein, 21 aa, Artificial Sequence
  Description of Artificial Sequence: Synthetic peptide
SNGISGFYEWFAAQVQTSDFQ

SEQ ID NO: 698 - protein, 21 aa, Artificial Sequence
  Description of Artificial Sequence: Synthetic peptide
LLGLSQAAYANFYDWFVSQLA

SEQ ID NO: 699 - protein, 21 aa, Artificial Sequence
  Description of Artificial Sequence: Synthetic peptide
VPNSWMFYNWFAEQIEGSEGE

SEQ ID NO: 700 - protein, 21 aa, Artificial Sequence
  Description of Artificial Sequence: Synthetic peptide
ARRADGFYDWFREQVSGSAVQ

SEQ ID NO: 701 - protein, 21 aa, Artificial Sequence
  Description of Artificial Sequence: Synthetic peptide
GVVEGTFYEWFDRLLGGVQGD

SEQ ID NO: 702 - protein, 21 aa, Artificial Sequence
  Description of Artificial Sequence: Synthetic peptide
SHLTDPFYQWFVDQLRAGVRG

SEQ ID NO: 703 - protein, 21 aa, Artificial Sequence
  Description of Artificial Sequence: Synthetic peptide
RSNDDAFYRWFSNILQVDGGG

SEQ ID NO: 704 - protein, 21 aa, Artificial Sequence
  Description of Artificial Sequence: Synthetic peptide
DSDGAQFYIWFEDQLRSAGWD

SEQ ID NO: 705 - protein, 21 aa, Artificial Sequence
  Description of Artificial Sequence: Synthetic peptide
PGLHRAFYQWFAEAVRSANKE

SEQ ID NO: 706 - protein, 20 aa, Artificial Sequence
  Description of Artificial Sequence: Synthetic peptide
SLGQGGFYDWFASQVGGADI

SEQ ID NO: 707 - protein, 21 aa, Artificial Sequence
  Description of Artificial Sequence: Synthetic peptide
CGQTQSFYQWFCEVMRVESGD

SEQ ID NO: 708 - protein, 21 aa, Artificial Sequence
  Description of Artificial Sequence: Synthetic peptide
IVVPGDTQGVNFYDWFVKQLQ

SEQ ID NO: 709 - protein, 21 aa, Artificial Sequence
  Description of Artificial Sequence: Synthetic peptide
RDVSMGSASTNFYDWFVQQLG

SEQ ID NO: 710 - protein, 21 aa, Artificial Sequence
  Description of Artificial Sequence: Synthetic peptide
SQAGSAFYAWFDQVLRTVHSA

SEQ ID NO: 711 - protein, 21 aa, Artificial Sequence
  Description of Artificial Sequence: Synthetic peptide
SNGISGFYEWFAAQVQTSDFQ

SEQ ID NO: 712 - protein, 17 aa, Artificial Sequence
  Description of Artificial Sequence: Synthetic peptide
RRDRGGLDVFFYQWFMD

SEQ ID NO: 713 - protein, 20 aa, Artificial Sequence
  Description of Artificial Sequence: Synthetic peptide
HLCVLEELFWGASLFGYCSG

SEQ ID NO: 714 - protein, 20 aa, Artificial Sequence
  Description of Artificial Sequence: Synthetic peptide
PLCVLEELFWSTPLFGQCSY

SEQ ID NO: 715 - protein, 20 aa, Artificial Sequence
  Description of Artificial Sequence: Synthetic peptide
HLCVLEELFWGASLFAQCVG

SEQ ID NO: 716 - protein, 20 aa, Artificial Sequence
  Description of Artificial Sequence: Synthetic peptide
DLCVLEELFWGASRFGQCSG

SEQ ID NO: 717 - protein, 20 aa, Artificial Sequence
  Description of Artificial Sequence: Synthetic peptide
HLCVLEELFWGASLFGQCAG

SEQ ID NO: 718 - protein, 20 aa, Artificial Sequence
  Description of Artificial Sequence: Synthetic peptide
HLCVVEELFWGASLFGQCSG

SEQ ID NO: 719 - protein, 20 aa, Artificial Sequence
  Description of Artificial Sequence: Synthetic peptide
NLCDLEVLFWGASLFRQCSG

SEQ ID NO: 720 - protein, 20 aa, Artificial Sequence
  Description of Artificial Sequence: Synthetic peptide
PLCVLEEQFWGASLFGQCSG

SEQ ID NO: 721 - protein, 20 aa, Artificial Sequence
  Description of Artificial Sequence: Synthetic peptide
QLCVLEELFWGASEFGQCSG

SEQ ID NO: 722 - protein, 20 aa, Artificial Sequence
  Description of Artificial Sequence: Synthetic peptide
HLCELEELFWGASLFGQCSG

SEQ ID NO: 723 - protein, 20 aa, Artificial Sequence
  Description of Artificial Sequence: Synthetic peptide
PLCVLEELFWGESLFGQCSG

SEQ ID NO: 724 - protein, 20 aa, Artificial Sequence
  Description of Artificial Sequence: Synthetic peptide
HLCVLEELFWGASRFGQCSG

SEQ ID NO: 725 - protein, 20 aa, Artificial Sequence
  Description of Artificial Sequence: Synthetic peptide
KLCVLEELFWGASLFGQCSG

SEQ ID NO: 726 - protein, 20 aa, Artificial Sequence
  Description of Artificial Sequence: Synthetic peptide
YLCVLEELSWGASLFGQCSG

SEQ ID NO: 727 - protein, 20 aa, Artificial Sequence
  Description of Artificial Sequence: Synthetic peptide
HLCVLEELLWGASLFAQCSG

SEQ ID NO: 728 - protein, 20 aa, Artificial Sequence
  Description of Artificial Sequence: Synthetic peptide
QLCVLEQLFWGESLFGQCSG

SEQ ID NO: 729 - protein, 20 aa, Artificial Sequence
  Description of Artificial Sequence: Synthetic peptide
HLCVLEELFWGGNLFSQCSG

SEQ ID NO: 730 - protein, 20 aa, Artificial Sequence
  Description of Artificial Sequence: Synthetic peptide
HLCVLEELFWGASLYGQCSG

SEQ ID NO: 731 - protein, 20 aa, Artificial Sequence
  Description of Artificial Sequence: Synthetic peptide
SLCALEEQFWGAALFGYCSG

SEQ ID NO: 732 - protein, 20 aa, Artificial Sequence
  Description of Artificial Sequence: Synthetic peptide
HLCVLEEQFWGASLFDGCAG

SEQ ID NO: 733 - protein, 20 aa, Artificial Sequence
  Description of Artificial Sequence: Synthetic peptide
QLCVLEELFWGASLFGQCSG

SEQ ID NO: 734 - protein, 20 aa, Artificial Sequence
  Description of Artificial Sequence: Synthetic peptide
PLCVLEELFWGAALFGQCSG

SEQ ID NO: 735 - protein, 20 aa, Artificial Sequence
  Description of Artificial Sequence: Synthetic peptide
HLCVLEELFWGASLFGQCTG

SEQ ID NO: 736 - protein, 20 aa, Artificial Sequence
  Description of Artificial Sequence: Synthetic peptide
PLCVLEELFWGGSLFGQCSG

SEQ ID NO: 737 - protein, 20 aa, Artificial Sequence
  Description of Artificial Sequence: Synthetic peptide
QLCVLEELVWGASLFGQCSG

SEQ ID NO: 738 - protein, 20 aa, Artificial Sequence
  Description of Artificial Sequence: Synthetic peptide
HLCVVEELIWGASLFGQCSR

SEQ ID NO: 739 - protein, 20 aa, Artificial Sequence
  Description of Artificial Sequence: Synthetic peptide
DLCVLEELFWGASLFGQCAG

SEQ ID NO: 740 - protein, 20 aa, Artificial Sequence
  Description of Artificial Sequence: Synthetic peptide
QLCVLEERFWGASLFGQCSG

SEQ ID NO: 741 - protein, 20 aa, Artificial Sequence
  Description of Artificial Sequence: Synthetic peptide
NLCVLEELFWGAALFGQCSG

SEQ ID NO: 742 - protein, 20 aa, Artificial Sequence
  Description of Artificial Sequence: Synthetic peptide
QLCVLEELFWGSSLFGQCSG

SEQ ID NO: 743 - protein, 20 aa, Artificial Sequence
  Description of Artificial Sequence: Synthetic peptide
DLCVVEELFWGKSLFGQCSG

SEQ ID NO: 744 - protein, 20 aa, Artificial Sequence
  Description of Artificial Sequence: Synthetic peptide
DLCVLEELFWGSSLFGQCSG

SEQ ID NO: 745 - protein, 20 aa, Artificial Sequence
  Description of Artificial Sequence: Synthetic peptide
YLCVLEEQFWGASLFRQCFG

SEQ ID NO: 746 - protein, 20 aa, Artificial Sequence
  Description of Artificial Sequence: Synthetic peptide
HLCVLEELLWGSSLFGQCSG

SEQ ID NO: 747 - protein, 20 aa, Artificial Sequence
  Description of Artificial Sequence: Synthetic peptide
PLCGLEELFWGASLFGQCSD

SEQ ID NO: 748 - protein, 20 aa, Artificial Sequence
  Description of Artificial Sequence: Synthetic peptide
HLCVLEELFWGSSLFAQCSG

SEQ ID NO: 749 - protein, 20 aa, Artificial Sequence
  Description of Artificial Sequence: Synthetic peptide
PLCAIEELFWGAALFGQCSG

SEQ ID NO: 750 - protein, 20 aa, Artificial Sequence
  Description of Artificial Sequence: Synthetic peptide
HLCVLEEQFWGASLFGDCSG

SEQ ID NO: 751 - protein, 20 aa, Artificial Sequence
  Description of Artificial Sequence: Synthetic peptide
PLCVLEELFWGAPLFGQCSD

SEQ ID NO: 752 - protein, 20 aa, Artificial Sequence
  Description of Artificial Sequence: Synthetic peptide
DLCGLEELFWGAALFGQCTS

SEQ ID NO: 753 - protein, 20 aa, Artificial Sequence
  Description of Artificial Sequence: Synthetic peptide
QLCVLEKQLWGASLFWQCSG

SEQ ID NO: 754 - protein, 20 aa, Artificial Sequence
  Description of Artificial Sequence: Synthetic peptide
HLCVLEELFWGASLYGQCPG

SEQ ID NO: 755 - protein, 20 aa, Artificial Sequence
  Description of Artificial Sequence: Synthetic peptide
HLCVLEELFWGASLFDQCSG

SEQ ID NO: 756 - protein, 20 aa, Artificial Sequence
  Description of Artificial Sequence: Synthetic peptide
HLCVLEELLWGASLFGQCSG

SEQ ID NO: 757 - protein, 20 aa, Artificial Sequence
  Description of Artificial Sequence: Synthetic peptide
PLCVLEELFWGVSLFGQCGG

SEQ ID NO: 758 - protein, 20 aa, Artificial Sequence
  Description of Artificial Sequence: Synthetic peptide
HLCVLEELFWGASQWGQCSG

SEQ ID NO: 759 - protein, 20 aa, Artificial Sequence
  Description of Artificial Sequence: Synthetic peptide
RLCVLEEQFWGGALFGQCSG

SEQ ID NO: 760 - protein, 20 aa, Artificial Sequence
  Description of Artificial Sequence: Synthetic peptide
QLCVLEELFWGVSLFAQCSG

SEQ ID NO: 761 - protein, 20 aa, Artificial Sequence
  Description of Artificial Sequence: Synthetic peptide
HLCVLEELFWGAALFGQCFG

SEQ ID NO: 762 - protein, 20 aa, Artificial Sequence
  Description of Artificial Sequence: Synthetic peptide
YLCVLEELFWGASQFGQCSG

SEQ ID NO: 763 - protein, 20 aa, Artificial Sequence
  Description of Artificial Sequence: Synthetic peptide
HLCVLEELYWGASLFGQCSG

SEQ ID NO: 764 - protein, 20 aa, Artificial Sequence
  Description of Artificial Sequence: Synthetic peptide
HLCVLEERFWGVSLFGQCSG

SEQ ID NO: 765 - protein, 20 aa, Artificial Sequence
  Description of Artificial Sequence: Synthetic peptide
PLCVLEELFWGASRFGQCSG

SEQ ID NO: 766 - protein, 20 aa, Artificial Sequence
  Description of Artificial Sequence: Synthetic peptide
HLCVLEDLFWGASLFDQCSG

SEQ ID NO: 767 - protein, 20 aa, Artificial Sequence
  Description of Artificial Sequence: Synthetic peptide
HLCDLEVLFWGASLFGQCSG

SEQ ID NO: 768 - protein, 20 aa, Artificial Sequence
  Description of Artificial Sequence: Synthetic peptide
QLCILEEQFWGTSLFGYCSG

SEQ ID NO: 769 - protein, 20 aa, Artificial Sequence
  Description of Artificial Sequence: Synthetic peptide
ALCVLEELFWGESLFGQCSG

SEQ ID NO: 770 - protein, 20 aa, Artificial Sequence
  Description of Artificial Sequence: Synthetic peptide
RLCVLEERFWGAALFGQCSG

SEQ ID NO: 771 - protein, 20 aa, Artificial Sequence
  Description of Artificial Sequence: Synthetic peptide
PLCVLEELFWGASLFGQCSG

SEQ ID NO: 772 - protein, 20 aa, Artificial Sequence
  Description of Artificial Sequence: Synthetic peptide
SLCVLEELFWGGSRFGQCSG

SEQ ID NO: 773 - protein, 20 aa, Artificial Sequence
  Description of Artificial Sequence: Synthetic peptide
HLCLLEEQFWGASLFGYCFE

SEQ ID NO: 774 - protein, 20 aa, Artificial Sequence
  Description of Artificial Sequence: Synthetic peptide
HLCVLEEQFWGASLFGQCSG

SEQ ID NO: 775 - protein, 20 aa, Artificial Sequence
  Description of Artificial Sequence: Synthetic peptide
DLCLLEELLWGASRFGQCSG

SEQ ID NO: 776 - protein, 20 aa, Artificial Sequence
  Description of Artificial Sequence: Synthetic peptide
YLCVLEERFWGASLFGQCSG

SEQ ID NO: 777 - protein, 20 aa, Artificial Sequence
  Description of Artificial Sequence: Synthetic peptide
HLCVLEEQFWGASLFGSCSG

SEQ ID NO: 778 - protein, 20 aa, Artificial Sequence
  Description of Artificial Sequence: Synthetic peptide
QLCVLEEQLWGASLFGQCSG

SEQ ID NO: 779 - protein, 20 aa, Artificial Sequence
  Description of Artificial Sequence: Synthetic peptide
  MOD_RES (10): Unknown amino acid; translation read-through at TGA stop codon
HLCVLEELFXGESLFGYCSG

SEQ ID NO: 780 - protein, 20 aa, Artificial Sequence
  Description of Artificial Sequence: Synthetic peptide
HLCVLEELFWGASLFGQCSG

SEQ ID NO: 781 - protein, 20 aa, Artificial Sequence
  Description of Artificial Sequence: Synthetic peptide
PLCVLEELFWGASHFGQCSG

SEQ ID NO: 782 - protein, 20 aa, Artificial Sequence
  Description of Artificial Sequence: Synthetic peptide
HLCVLEELVWGASLFGQCAG

SEQ ID NO: 783 - protein, 20 aa, Artificial Sequence
  Description of Artificial Sequence: Synthetic peptide
QLCVLEELIWGASLFGQCAG

SEQ ID NO: 784 - protein, 20 aa, Artificial Sequence
  Description of Artificial Sequence: Synthetic peptide
HLCGLEELFWGASLFGQCSG

SEQ ID NO: 785 - protein, 20 aa, Artificial Sequence
  Description of Artificial Sequence: Synthetic peptide
HLCVLEELVWGESLFGQCSG

SEQ ID NO: 786 - protein, 20 aa, Artificial Sequence
  Description of Artificial Sequence: Synthetic peptide
RLCVLEELYWGASLFGQCSG

SEQ ID NO: 787 - protein, 20 aa, Artificial Sequence
  Description of Artificial Sequence: Synthetic peptide
RLCILEELFWGASLFGQCSG

SEQ ID NO: 788 - protein, 20 aa, Artificial Sequence
  Description of Artificial Sequence: Synthetic peptide
HLCVLEELFWGATLFDQCSG

SEQ ID NO: 789 - protein, 20 aa, Artificial Sequence
  Description of Artificial Sequence: Synthetic peptide
HLCFLEELFWGASMFGQCSG

SEQ ID NO: 790 - protein, 20 aa, Artificial Sequence
  Description of Artificial Sequence: Synthetic peptide
HLCIVEELFWAAPLFGQCSG

SEQ ID NO: 791 - protein, 20 aa, Artificial Sequence
  Description of Artificial Sequence: Synthetic peptide
HLCVLEELWWGASLFAQCSA

SEQ ID NO: 792 - protein, 20 aa, Artificial Sequence
  Description of Artificial Sequence: Synthetic peptide
NLCALEELFWGASQFRYCPG

SEQ ID NO: 793 - protein, 20 aa, Artificial Sequence
  Description of Artificial Sequence: Synthetic peptide
RLCVLEELFWGASLFGQCSG

SEQ ID NO: 794 - protein, 20 aa, Artificial Sequence
  Description of Artificial Sequence: Synthetic peptide
PLCVLEELFWGASLFGQCPG

SEQ ID NO: 795 - protein, 20 aa, Artificial Sequence
  Description of Artificial Sequence: Synthetic peptide
NLCVLEELFWGASLFGQCSG

SEQ ID NO: 796 - protein, 20 aa, Artificial Sequence
  Description of Artificial Sequence: Synthetic peptide
  MOD_RES (7): Unknown amino acid; translation read-through at TAA stop codon
QLCVLGXRFWGGSLCGYCSD

SEQ ID NO: 797 - protein, 20 aa, Artificial Sequence
  Description of Artificial Sequence: Synthetic peptide
PLCFLQELFGGASLGGYCSG

SEQ ID NO: 798 - protein, 20 aa, Artificial Sequence
  Description of Artificial Sequence: Synthetic peptide
FMCGLQELVGGAALLGHCSG

SEQ ID NO: 799 - protein, 20 aa, Artificial Sequence
  Description of Artificial Sequence: Synthetic peptide
PLCFLQELFGGGSLSGYCSG

SEQ ID NO: 800 - protein, 20 aa, Artificial Sequence
  Description of Artificial Sequence: Synthetic peptide
FLCGLEELAWGVSRSGYCFG

SEQ ID NO: 801 - protein, 20 aa, Artificial Sequence
  Description of Artificial Sequence: Synthetic peptide
PLCFLAELFSGSALGGDCSR

SEQ ID NO: 802 - protein, 20 aa, Artificial Sequence
  Description of Artificial Sequence: Synthetic peptide
PLCVLQELFGGGSLGGYCSG

SEQ ID NO: 803 - protein, 20 aa, Artificial Sequence
  Description of Artificial Sequence: Synthetic peptide
  MOD_RES (7): Unknown amino acid; translation read-through at TAA stop codon
QLCVLEXLFWGACLFGYCAG

SEQ ID NO: 804 - protein, 20 aa, Artificial Sequence
  Description of Artificial Sequence: Synthetic peptide
FLCGLQELSGVASLFGQCSG

SEQ ID NO: 805 - protein, 20 aa, Artificial Sequence
  Description of Artificial Sequence: Synthetic peptide
  MOD_RES (18): Unknown amino acid; translation read-through at TGA stop codon
RVCVLEQLVWGASLFGAXSG

SEQ ID NO: 806 - protein, 20 aa, Artificial Sequence
  Description of Artificial Sequence: Synthetic peptide
FYCGLEELSWGAALFGYCSG

SEQ ID NO: 807 - protein, 20 aa, Artificial Sequence
  Description of Artificial Sequence: Synthetic peptide
FLCGLEELSQGAVLFGHCYG

SEQ ID NO: 808 - protein, 20 aa, Artificial Sequence
  Description of Artificial Sequence: Synthetic peptide
HLCVLVGLFWDASLFGQCSG

SEQ ID NO: 809 - protein, 20 aa, Artificial Sequence
  Description of Artificial Sequence: Synthetic peptide
QRCIRAALFWCATLLGGCAG

SEQ ID NO: 810 - protein, 20 aa, Artificial Sequence
  Description of Artificial Sequence: Synthetic peptide
HQCIPDGMSQGAALRGNCSD

SEQ ID NO: 811 - protein, 20 aa, Artificial Sequence
  Description of Artificial Sequence: Synthetic peptide
HLCVLEDELWGVSLFGYCSS

SEQ ID NO: 812 - protein, 20 aa, Artificial Sequence
  Description of Artificial Sequence: Synthetic peptide
HLCMLEEQFWGASLFSRCSG

SEQ ID NO: 813 - protein, 20 aa, Artificial Sequence
  Description of Artificial Sequence: Synthetic peptide
TCAFWKNGSGVRRCSVTAVV

SEQ ID NO: 814 - protein, 20 aa, Artificial Sequence
  Description of Artificial Sequence: Synthetic peptide
  MOD_RES (8): Unknown amino acid
PLCGLKNXSGVRLCSSPALV

SEQ ID NO: 815 - protein, 20 aa, Artificial Sequence
  Description of Artificial Sequence: Synthetic peptide
PLCLQEELFWGASLFGYCSG

SEQ ID NO: 816 - protein, 20 aa, Artificial Sequence
  Description of Artificial Sequence: Synthetic peptide
PLCDLEELFWGASLFGDCPG

SEQ ID NO: 817 - protein, 20 aa, Artificial Sequence
  Description of Artificial Sequence: Synthetic peptide
DLCVLEELFWDGSLFASCSG

SEQ ID NO: 818 - protein, 20 aa, Artificial Sequence
  Description of Artificial Sequence: Synthetic peptide
PLCVLEEQLWGTALFGSCTG

SEQ ID NO: 819 - protein, 20 aa, Artificial Sequence
  Description of Artificial Sequence: Synthetic peptide
PLCLVEELLWGASLFSQCTG

SEQ ID NO: 820 - protein, 20 aa, Artificial Sequence
  Description of Artificial Sequence: Synthetic peptide
PLCDLEELYWGAALFGSCSG

SEQ ID NO: 821 - protein, 20 aa, Artificial Sequence
  Description of Artificial Sequence: Synthetic peptide
GLCFLEEQFWGTSLFRDCPG

SEQ ID NO: 822 - protein, 20 aa, Artificial Sequence
  Description of Artificial Sequence: Synthetic peptide
PLCVVEELFWGASLYGQCSG

SEQ ID NO: 823 - protein, 20 aa, Artificial Sequence
  Description of Artificial Sequence: Synthetic peptide
RLCVLEELFWGASRFRGCSG

SEQ ID NO: 824 - protein, 20 aa, Artificial Sequence
  Description of Artificial Sequence: Synthetic peptide
PLCVLEELHWGAALFGYCSG

SEQ ID NO: 825 - protein, 20 aa, Artificial Sequence
  Description of Artificial Sequence: Synthetic peptide
NLCVVEELFWGASLFPNCSG

SEQ ID NO: 826 - protein, 20 aa, Artificial Sequence
  Description of Artificial Sequence: Synthetic peptide
QLCVLEELFWGASMFEDCSG

SEQ ID NO: 827 - protein, 20 aa, Artificial Sequence
  Description of Artificial Sequence: Synthetic peptide
HLCVLEEQFWGASLFGQCSG

SEQ ID NO: 828 - protein, 20 aa, Artificial Sequence
  Description of Artificial Sequence: Synthetic peptide
PLCVLEEIYWGAALFGDCYG

SEQ ID NO: 829 - protein, 19 aa, Artificial Sequence
  Description of Artificial Sequence: Synthetic peptide
PLCVLEELFWGLSLDKNCS

SEQ ID NO: 830 - protein, 20 aa, Artificial Sequence
  Description of Artificial Sequence: Synthetic peptide
QLCVLEELFWGASLFSGCSG

SEQ ID NO: 831 - protein, 20 aa, Artificial Sequence
  Description of Artificial Sequence: Synthetic peptide
PLCDLEALFWGESLFGGCSG

SEQ ID NO: 832 - protein, 20 aa, Artificial Sequence
  Description of Artificial Sequence: Synthetic peptide
HLCVLEEMFWGTSHFDGCSG

SEQ ID NO: 833 - protein, 20 aa, Artificial Sequence
  Description of Artificial Sequence: Synthetic peptide
DLCVLEELFWGAPLFGLCSG

SEQ ID NO: 834 - protein, 20 aa, Artificial Sequence
  Description of Artificial Sequence: Synthetic peptide
DLCVLEELFWGVALYGGCSG

SEQ ID NO: 835 - protein, 20 aa, Artificial Sequence
  Description of Artificial Sequence: Synthetic peptide
QLCVLEELYWGASLFGHCSG

SEQ ID NO: 836 - protein, 20 aa, Artificial Sequence
  Description of Artificial Sequence: Synthetic peptide
HLCVLEDRFWGASLFGPCSG

SEQ ID NO: 837 - protein, 20 aa, Artificial Sequence
  Description of Artificial Sequence: Synthetic peptide
HLCGMEEMFWGVALFRNCSG

SEQ ID NO: 838 - protein, 20 aa, Artificial Sequence
  Description of Artificial Sequence: Synthetic peptide
PLCVLEQLYWGESLFVYCSG

SEQ ID NO: 839 - protein, 20 aa, Artificial Sequence
  Description of Artificial Sequence: Synthetic peptide
HLCLLEELFWGEALWGYCSG

SEQ ID NO: 840 - protein, 20 aa, Artificial Sequence
  Description of Artificial Sequence: Synthetic peptide
QLCVMEELFWGASRFGQCSG

SEQ ID NO: 841 - protein, 20 aa, Artificial Sequence
  Description of Artificial Sequence: Synthetic peptide
HLCVLEELFWGASMFGQCSG

SEQ ID NO: 842 - protein, 20 aa, Artificial Sequence
  Description of Artificial Sequence: Synthetic peptide
QLCVLEEMFWGGSRFVQCSA

SEQ ID NO: 843 - protein, 20 aa, Artificial Sequence
  Description of Artificial Sequence: Synthetic peptide
PLCILEELFWGEALFDQCGA

SEQ ID NO: 844 - protein, 20 aa, Artificial Sequence
  Description of Artificial Sequence: Synthetic peptide
YLCVQEELFWGASLFGYCSV

SEQ ID NO: 845 - protein, 20 aa, Artificial Sequence
  Description of Artificial Sequence: Synthetic peptide
HLCALEEAFFGPSLFNSCQG

SEQ ID NO: 846 - protein, 20 aa, Artificial Sequence
  Description of Artificial Sequence: Synthetic peptide
HLCVLEERFWGASLFGQCSG

SEQ ID NO: 847 - protein, 20 aa, Artificial Sequence
  Description of Artificial Sequence: Synthetic peptide
QLCDLEELFWGASLFGYCPG

SEQ ID NO: 848 - protein, 20 aa, Artificial Sequence
  Description of Artificial Sequence: Synthetic peptide
HLCVLEERFWGASIWGSCSG

SEQ ID NO: 849 - protein, 20 aa, Artificial Sequence
  Description of Artificial Sequence: Synthetic peptide
QLCVLEELFWGGSLWGQCSR

SEQ ID NO: 850 - protein, 20 aa, Artificial Sequence
  Description of Artificial Sequence: Synthetic peptide
PLCVLEELFWGAAQFGQCSG

SEQ ID NO: 851 - protein, 20 aa, Artificial Sequence
  Description of Artificial Sequence: Synthetic peptide
QLCDLEERFWGVSLFGLCSG

SEQ ID NO: 852 - protein, 20 aa, Artificial Sequence
  Description of Artificial Sequence: Synthetic peptide
QLCVLEEVFWGASLFGLCTG

SEQ ID NO: 853 - protein, 20 aa, Artificial Sequence
  Description of Artificial Sequence: Synthetic peptide
  MOD_RES (3): Unknown amino acid
QLXDLNTWSGLCLCSVTVRV

SEQ ID NO: 854 - protein, 20 aa, Artificial Sequence
  Description of Artificial Sequence: Synthetic peptide
DLCVLEESLWGKALFGYCSD

SEQ ID NO: 855 - protein, 20 aa, Artificial Sequence
  Description of Artificial Sequence: Synthetic peptide
HLCVLEEVFWGSSMFGDCSG

SEQ ID NO: 856 - protein, 20 aa, Artificial Sequence
  Description of Artificial Sequence: Synthetic peptide
HLCDLEELFWGASLFGDCQG

SEQ ID NO: 857 - protein, 20 aa, Artificial Sequence
  Description of Artificial Sequence: Synthetic peptide
QLCVLDALMWGGCRLGHQCG

SEQ ID NO: 858 - protein, 20 aa, Artificial Sequence
  Description of Artificial Sequence: Synthetic peptide
QLCVLEEKFWGTSLFGDCMG

SEQ ID NO: 859 - protein, 20 aa, Artificial Sequence
  Description of Artificial Sequence: Synthetic peptide
HLCVLEEVFWGAAQFGSCSG

SEQ ID NO: 860 - protein, 20 aa, Artificial Sequence
  Description of Artificial Sequence: Synthetic peptide
QLCVLEELFWGPSMFGYCSG

SEQ ID NO: 861 - protein, 20 aa, Artificial Sequence
  Description of Artificial Sequence: Synthetic peptide
HLCDLEELFWGASGFAQCYG

SEQ ID NO: 862 - protein, 20 aa, Artificial Sequence
  Description of Artificial Sequence: Synthetic peptide
DLCVLEERFWGASLFGQCSG

SEQ ID NO: 863 - protein, 20 aa, Artificial Sequence
  Description of Artificial Sequence: Synthetic peptide
QLCVLEELHWGASLFGYCSG

SEQ ID NO: 864 - protein, 20 aa, Artificial Sequence
  Description of Artificial Sequence: Synthetic peptide
PLCVLEEQFWGASLFGQCSG

SEQ ID NO: 865 - protein, 20 aa, Artificial Sequence
  Description of Artificial Sequence: Synthetic peptide
YLCDLEERFWGASLFGQCSS

SEQ ID NO: 866 - protein, 20 aa, Artificial Sequence
  Description of Artificial Sequence: Synthetic peptide
HLCLLEERFWGSSQFGFCSG

SEQ ID NO: 867 - protein, 20 aa, Artificial Sequence
  Description of Artificial Sequence: Synthetic peptide
HLCVLEELFWGASQFGQCSG

SEQ ID NO: 868 - protein, 20 aa, Artificial Sequence
  Description of Artificial Sequence: Synthetic peptide
HLCYLEERFWGASLFGQCSG

SEQ ID NO: 869 - protein, 20 aa, Artificial Sequence
  Description of Artificial Sequence: Synthetic peptide
HLCVMEELFWGTSLFGQCTG

SEQ ID NO: 870 - protein, 20 aa, Artificial Sequence
  Description of Artificial Sequence: Synthetic peptide
HLCVLEERFWGASLFGQCSG

SEQ ID NO: 871 - protein, 20 aa, Artificial Sequence
  Description of Artificial Sequence: Synthetic peptide
HLCVLEERFWGASLFSQCSG

SEQ ID NO: 872 - protein, 20 aa, Artificial Sequence
  Description of Artificial Sequence: Synthetic peptide
HLCVLEELFWGASLFGQCSG

SEQ ID NO: 873 - protein, 20 aa, Artificial Sequence
  Description of Artificial Sequence: Synthetic peptide
QLCLLEELFWGAASFGQCSG

SEQ ID NO: 874 - protein, 20 aa, Artificial Sequence
  Description of Artificial Sequence: Synthetic peptide
HLCVLEEMFWGASLFGQCSG

SEQ ID NO: 875 - protein, 20 aa, Artificial Sequence
  Description of Artificial Sequence: Synthetic peptide
HLCDLEELFWGASLFSQCSR

SEQ ID NO: 876 - protein, 20 aa, Artificial Sequence
  Description of Artificial Sequence: Synthetic peptide
QLCVLEELFWGASQFGYCSG

SEQ ID NO: 877 - protein, 20 aa, Artificial Sequence
  Description of Artificial Sequence: Synthetic peptide
QLCALEEQFWGASLFSQCSG

SEQ ID NO: 878 - protein, 20 aa, Artificial Sequence
  Description of Artificial Sequence: Synthetic peptide
QLCVLEELFWGASLFGYCSG

SEQ ID NO: 879 - protein, 20 aa, Artificial Sequence
  Description of Artificial Sequence: Synthetic peptide
HLCVLEEWFWGDSLFGQCSR

SEQ ID NO: 880 - protein, 20 aa, Artificial Sequence
  Description of Artificial Sequence: Synthetic peptide
HLCVLEERFWGASLFGQCSG

SEQ ID NO: 881 - protein, 20 aa, Artificial Sequence
  Description of Artificial Sequence: Synthetic peptide
QLCELEEVFWGASLFDYCSG

SEQ ID NO: 882 - protein, 20 aa, Artificial Sequence
  Description of Artificial Sequence: Synthetic peptide
HLCVLEELFWGASRFGQCSG

SEQ ID NO: 883 - protein, 20 aa, Artificial Sequence
  Description of Artificial Sequence: Synthetic peptide
HLCVLEELFWGASLFGQCSA

SEQ ID NO: 884 - protein, 20 aa, Artificial Sequence
  Description of Artificial Sequence: Synthetic peptide
HLCVLEELIWGASRFGQCSG

SEQ ID NO: 885 - protein, 20 aa, Artificial Sequence
  Description of Artificial Sequence: Synthetic peptide
HLCVLEELFWGGSLFIQCSG

SEQ ID NO: 886 - protein, 20 aa, Artificial Sequence
  Description of Artificial Sequence: Synthetic peptide
QLCVLEEQFWGASLFGNCSG

SEQ ID NO: 887 - protein, 20 aa, Artificial Sequence
  Description of Artificial Sequence: Synthetic peptide
HLCVLEERFWGAALFGQCSG

SEQ ID NO: 888 - protein, 20 aa, Artificial Sequence
  Description of Artificial Sequence: Synthetic peptide
HLCILEEMFWGASLFGQCGG

SEQ ID NO: 889 - protein, 20 aa, Artificial Sequence
  Description of Artificial Sequence: Synthetic peptide
PLCVLEELVWGASLFVQCSG

SEQ ID NO: 890 - protein, 20 aa, Artificial Sequence
  Description of Artificial Sequence: Synthetic peptide
NLCVLEELFWGESLFGQCSG

SEQ ID NO: 891 - protein, 20 aa, Artificial Sequence
  Description of Artificial Sequence: Synthetic peptide
HLCVLEEQFWGGSLFGYCSR

SEQ ID NO: 892 - protein, 20 aa, Artificial Sequence
  Description of Artificial Sequence: Synthetic peptide
HLCFLEEVFWGAALFAQCSG

SEQ ID NO: 893 - protein, 20 aa, Artificial Sequence
  Description of Artificial Sequence: Synthetic peptide
HLCDLEVLFWGSALFGQCSG

SEQ ID NO: 894 - protein, 20 aa, Artificial Sequence
  Description of Artificial Sequence: Synthetic peptide
HLCVMEELFWGASLFGQCSG

SEQ ID NO: 895 - protein, 20 aa, Artificial Sequence
  Description of Artificial Sequence: Synthetic peptide
HLCVLEERFWGASLFWQCSG

SEQ ID NO: 896 - protein, 20 aa, Artificial Sequence
  Description of Artificial Sequence: Synthetic peptide
HLCVLEEQYWGESLFGYCSG

SEQ ID NO: 897 - protein, 20 aa, Artificial Sequence
  Description of Artificial Sequence: Synthetic peptide
PLCVLEEQFWGASLFAYCSS

SEQ ID NO: 898 - protein, 20 aa, Artificial Sequence
  Description of Artificial Sequence: Synthetic peptide
QLCVLEELFWGESLFAQCLG

SEQ ID NO: 899 - protein, 20 aa, Artificial Sequence
  Description of Artificial Sequence: Synthetic peptide
HLCVLEELFWGQSLFGHCSD

SEQ ID NO: 900 - protein, 20 aa, Artificial Sequence
  Description of Artificial Sequence: Synthetic peptide
HLCVLEELVWGASLFGFCSG

SEQ ID NO: 901 - protein, 20 aa, Artificial Sequence
  Description of Artificial Sequence: Synthetic peptide
LLCVLEEQFWGASLFGQCSG

SEQ ID NO: 902 - protein, 20 aa, Artificial Sequence
  Description of Artificial Sequence: Synthetic peptide
RLCVLEELFWGESLFGQCSG

SEQ ID NO: 903 - protein, 20 aa, Artificial Sequence
  Description of Artificial Sequence: Synthetic peptide
HLCVLEEMFWGASLFGNCSG

SEQ ID NO: 904 - protein, 20 aa, Artificial Sequence
  Description of Artificial Sequence: Synthetic peptide
ELCFLEELFWGASLFGQCSG

SEQ ID NO: 905 - protein, 20 aa, Artificial Sequence
  Description of Artificial Sequence: Synthetic peptide
HLCVLEELFWGASLYGQCSS

SEQ ID NO: 906 - protein, 20 aa, Artificial Sequence
  Description of Artificial Sequence: Synthetic peptide
HLCVLEELFWGASLFAQCPG

SEQ ID NO: 907 - protein, 20 aa, Artificial Sequence
  Description of Artificial Sequence: Synthetic peptide
NLCVLEELFWGASEFGQCSG

SEQ ID NO: 908 - protein, 20 aa, Artificial Sequence
  Description of Artificial Sequence: Synthetic peptide
DLCVLEEQLWGASLFRYCSG

SEQ ID NO: 909 - protein, 20 aa, Artificial Sequence
  Description of Artificial Sequence: Synthetic peptide
HLCVLEEQFWGVALFGNCSG

SEQ ID NO: 910 - protein, 20 aa, Artificial Sequence
  Description of Artificial Sequence: Synthetic peptide
HLCVLEVQIWGASLFGQCSG

SEQ ID NO: 911 - protein, 20 aa, Artificial Sequence
  Description of Artificial Sequence: Synthetic peptide
HLCVLEERFWGGALFGQCTA

SEQ ID NO: 912 - protein, 20 aa, Artificial Sequence
  Description of Artificial Sequence: Synthetic peptide
HLCDLEELFWGASLFGQCSG

SEQ ID NO: 913 - protein, 20 aa, Artificial Sequence
  Description of Artificial Sequence: Synthetic peptide
QLCVLEELFWGTSLFAGCSG

SEQ ID NO: 914 - protein, 20 aa, Artificial Sequence
  Description of Artificial Sequence: Synthetic peptide
QLCGLEELFWGASLFGYCSA

SEQ ID NO: 915 - protein, 20 aa, Artificial Sequence
  Description of Artificial Sequence: Synthetic peptide
HLCVLEELFWGASLFGQCSS

SEQ ID NO: 916 - protein, 20 aa, Artificial Sequence
  Description of Artificial Sequence: Synthetic peptide
FLCVLEELYWGASQFGQCSG

SEQ ID NO: 917 - protein, 20 aa, Artificial Sequence
  Description of Artificial Sequence: Synthetic peptide
HLCVLEEQFWGASLFGYCSG

SEQ ID NO: 918 - protein, 20 aa, Artificial Sequence
  Description of Artificial Sequence: Synthetic peptide
RLCALEELFWGASLFGQCSG

SEQ ID NO: 919 - protein, 20 aa, Artificial Sequence
  Description of Artificial Sequence: Synthetic peptide
HLCVLEELFWGAALFHQCSG

SEQ ID NO: 920 - protein, 20 aa, Artificial Sequence
  Description of Artificial Sequence: Synthetic peptide
RLCVLEEQFWGASLFGQCSG

SEQ ID NO: 921 - protein, 20 aa, Artificial Sequence
  Description of Artificial Sequence: Synthetic peptide
QLCVLEELFWGSSRLGYCSG

SEQ ID NO: 922 - protein, 20 aa, Artificial Sequence
  Description of Artificial Sequence: Synthetic peptide
DLCVLEELFWGASLFGQCSG

SEQ ID NO: 923 - protein, 20 aa, Artificial Sequence
  Description of Artificial Sequence: Synthetic peptide
QLCLLEEQFWGGSLFGQCSG

SEQ ID NO: 924 - protein, 20 aa, Artificial Sequence
  Description of Artificial Sequence: Synthetic peptide
HLCVLEELFWGTSLFGQCSG

SEQ ID NO: 925 - protein, 20 aa, Artificial Sequence
  Description of Artificial Sequence: Synthetic peptide
RLCVLEELVWGASLFDQCSR

SEQ ID NO: 926 - protein, 20 aa, Artificial Sequence
  Description of Artificial Sequence: Synthetic peptide
EIEAEWGRVRCLVYGRCVGG

SEQ ID NO: 927 - protein, 20 aa, Artificial Sequence
  Description of Artificial Sequence: Synthetic peptide
EIEAEWGRVRCLVYGRCVGG

SEQ ID NO: 928 - protein, 20 aa, Artificial Sequence
  Description of Artificial Sequence: Synthetic peptide
WLDQEWAWVQCEVYGRGCPS

SEQ ID NO: 929 - protein, 20 aa, Artificial Sequence
  Description of Artificial Sequence: Synthetic peptide
WLDQEWAWVQCEVYGRGCPS

SEQ ID NO: 930 - protein, 20 aa, Artificial Sequence
  Description of Artificial Sequence: Synthetic peptide
WLDLEWAQVQCEVYGRGCPS

SEQ ID NO: 931 - protein, 20 aa, Artificial Sequence
  Description of Artificial Sequence: Synthetic peptide
WLDQEWAQVQCEVFGRGCPS

SEQ ID NO: 932 - protein, 20 aa, Artificial Sequence
  Description of Artificial Sequence: Synthetic peptide
WLDQEWQQVQCQVYGRGCTS

SEQ ID NO: 933 - protein, 20 aa, Artificial Sequence
  Description of Artificial Sequence: Synthetic peptide
RLDEEWARVQCEVWGRGCRS

SEQ ID NO: 934 - protein, 20 aa, Artificial Sequence
  Description of Artificial Sequence: Synthetic peptide
WLEQEWAWIQCEVYGRGCPS

SEQ ID NO: 935 - protein, 20 aa, Artificial Sequence
  Description of Artificial Sequence: Synthetic peptide
WLEQEWAQVQCEVYGRGCPS

SEQ ID NO: 936 - protein, 20 aa, Artificial Sequence
  Description of Artificial Sequence: Synthetic peptide
WLDEEWEWIQCKVYGRGCPA

SEQ ID NO: 937 - protein, 20 aa, Artificial Sequence
  Description of Artificial Sequence: Synthetic peptide
WLEQEWAWVQCEVYGRGCQS

SEQ ID NO: 938 - protein, 20 aa, Artificial Sequence
  Description of Artificial Sequence: Synthetic peptide
WLDQEWAWIQCEVYGRGCPA

SEQ ID NO: 939 - protein, 20 aa, Artificial Sequence
  Description of Artificial Sequence: Synthetic peptide
SLDWEWAWLQCEVYGRGCPS

SEQ ID NO: 940 - protein, 20 aa, Artificial Sequence
  Description of Artificial Sequence: Synthetic peptide
WLEQEWEQVRCLVYGRGCPP

SEQ ID NO: 941 - protein, 20 aa, Artificial Sequence
  Description of Artificial Sequence: Synthetic peptide
WLDQEWAWVQCEVYGRGCPY

SEQ ID NO: 942 - protein, 20 aa, Artificial Sequence
  Description of Artificial Sequence: Synthetic peptide
WLDQEWAGVLCEVYGRGCPS

SEQ ID NO: 943 - protein, 20 aa, Artificial Sequence
  Description of Artificial Sequence: Synthetic peptide
SLDKEWEWVLCVVYGRGCPS

SEQ ID NO: 944 - protein, 20 aa, Artificial Sequence
  Description of Artificial Sequence: Synthetic peptide
WLEQEWAQVQCEVYGRGCRS

SEQ ID NO: 945 - protein, 20 aa, Artificial Sequence
  Description of Artificial Sequence: Synthetic peptide
WLEEEWAQVQCAVYGRGCSS

SEQ ID NO: 946 - protein, 20 aa, Artificial Sequence
  Description of Artificial Sequence: Synthetic peptide
WLDQEWALVQCEVYGRGCPS

SEQ ID NO: 947 - protein, 20 aa, Artificial Sequence
  Description of Artificial Sequence: Synthetic peptide
WLDQEWAWVQCEVYGRGCPS

SEQ ID NO: 948 - protein, 20 aa, Artificial Sequence
  Description of Artificial Sequence: Synthetic peptide
WLEQEWAWVQCEVYGRGCAS

SEQ ID NO: 949 - protein, 20 aa, Artificial Sequence
  Description of Artificial Sequence: Synthetic peptide
WLDQEWAWVECEVYGRRCPS

SEQ ID NO: 950 - protein, 20 aa, Artificial Sequence
  Description of Artificial Sequence: Synthetic peptide
WLDQEWAWVECQVYGRGCPS

SEQ ID NO: 951 - protein, 20 aa, Artificial Sequence
  Description of Artificial Sequence: Synthetic peptide
QLDQEWAWVLCKVYGRGCPS

SEQ ID NO: 952 - protein, 20 aa, Artificial Sequence
  Description of Artificial Sequence: Synthetic peptide
  MOD_RES (6): Unknown amino acid; translation read-through at TGA stop codon
WLDHEXAWVQCEVYGRGCPS

SEQ ID NO: 953 - protein, 20 aa, Artificial Sequence
  Description of Artificial Sequence: Synthetic peptide
QLEQEWAWVRCEVYGRGCSS

SEQ ID NO: 954 - protein, 20 aa, Artificial Sequence
  Description of Artificial Sequence: Synthetic peptide
WLDQEWAWVQCQVYGRGCLS

SEQ ID NO: 955 - protein, 20 aa, Artificial Sequence
  Description of Artificial Sequence: Synthetic peptide
WLDQEWAWVRCEVYGLGCPS

SEQ ID NO: 956 - protein, 20 aa, Artificial Sequence
  Description of Artificial Sequence: Synthetic peptide
WLDQEWAVMKCELYGRGCPS

SEQ ID NO: 957 - protein, 20 aa, Artificial Sequence
  Description of Artificial Sequence: Synthetic peptide
WLEQEWAWVQCEVYGRGCLS

SEQ ID NO: 958 - protein, 20 aa, Artificial Sequence
  Description of Artificial Sequence: Synthetic peptide
SLDQEWAWVQCEVYGRGCLS

SEQ ID NO: 959 - protein, 20 aa, Artificial Sequence
  Description of Artificial Sequence: Synthetic peptide
WLDHEWAWVQCEVYGRGCTS

SEQ ID NO: 960 - protein, 20 aa, Artificial Sequence
  Description of Artificial Sequence: Synthetic peptide
WLDVEWAWVQCEVYGRGCPS

SEQ ID NO: 961 - protein, 20 aa, Artificial Sequence
  Description of Artificial Sequence: Synthetic peptide
QLDQEWARVRCEVWGRGCSS

SEQ ID NO: 962 - protein, 20 aa, Artificial Sequence
  Description of Artificial Sequence: Synthetic peptide
WLDLEWAQVQCKVYGRGCPS

SEQ ID NO: 963 - protein, 20 aa, Artificial Sequence
  Description of Artificial Sequence: Synthetic peptide
WLDEEWAWVQCQVYGRGCPS

SEQ ID NO: 964 - protein, 20 aa, Artificial Sequence
  Description of Artificial Sequence: Synthetic peptide
WLDQEWAWVQCEVWGRGCAF

SEQ ID NO: 965 - protein, 20 aa, Artificial Sequence
  Description of Artificial Sequence: Synthetic peptide
WLDREWAQVQCEVYGRGCLS

SEQ ID NO: 966 - protein, 20 aa, Artificial Sequence
  Description of Artificial Sequence: Synthetic peptide
WLDAEWEWVQCEVYGRGCRP

SEQ ID NO: 967 - protein, 20 aa, Artificial Sequence
  Description of Artificial Sequence: Synthetic peptide
SLDREWAYVQCQVYGRGCSS

SEQ ID NO: 968 - protein, 20 aa, Artificial Sequence
  Description of Artificial Sequence: Synthetic peptide
RLDLEWANIQCEVYGRGCPS

SEQ ID NO: 969 - protein, 20 aa, Artificial Sequence
  Description of Artificial Sequence: Synthetic peptide
WLEQEWARVQCEVYGRGCSS

SEQ ID NO: 970 - protein, 20 aa, Artificial Sequence
  Description of Artificial Sequence: Synthetic peptide
WLEQEWILVECEVYGRGCPT

SEQ ID NO: 971 - protein, 20 aa, Artificial Sequence
  Description of Artificial Sequence: Synthetic peptide
WLEQEWAQVQCEVWGRGCPS

SEQ ID NO: 972 - protein, 20 aa, Artificial Sequence
  Description of Artificial Sequence: Synthetic peptide
WLDQEWEWIQCEVYGRGCPL

SEQ ID NO: 973 - protein, 20 aa, Artificial Sequence
  Description of Artificial Sequence: Synthetic peptide
LLDEEWAQIECEIYGRGCPS

SEQ ID NO: 974 - protein, 20 aa, Artificial Sequence
  Description of Artificial Sequence: Synthetic peptide
ALEEEWAWVQCEVYGRGCHF

SEQ ID NO: 975 - protein, 20 aa, Artificial Sequence
  Description of Artificial Sequence: Synthetic peptide
  MOD_RES (2): Unknown amino acid
CXEQEWGLVQCEVYGRGCPS

SEQ ID NO: 976 - protein, 20 aa, Artificial Sequence
  Description of Artificial Sequence: Synthetic peptide
WLEQEWAYVQCEVYGRGCPS

SEQ ID NO: 977 - protein, 20 aa, Artificial Sequence
  Description of Artificial Sequence: Synthetic peptide
WLEHEWAQVQCEVWGRGCPY

SEQ ID NO: 978 - protein, 20 aa, Artificial Sequence
  Description of Artificial Sequence: Synthetic peptide
WLEQEWAEVRCEVYGRGCPR

SEQ ID NO: 979 - protein, 20 aa, Artificial Sequence
  Description of Artificial Sequence: Synthetic peptide
  MOD_RES (1): Unknown amino acid
XLEQEWAWVQCEVYGRGCPS

SEQ ID NO: 980 - protein, 20 aa, Artificial Sequence
  Description of Artificial Sequence: Synthetic peptide
WLEQEWAGIQCKVYGRGCPS

SEQ ID NO: 981 - protein, 20 aa, Artificial Sequence
  Description of Artificial Sequence: Synthetic peptide
RLEQEWAQVQCEVWGRGCLP

SEQ ID NO: 982 - protein, 20 aa, Artificial Sequence
  Description of Artificial Sequence: Synthetic peptide
QLDHEWAGIQCEVWGRGCPS

SEQ ID NO: 983 - protein, 20 aa, Artificial Sequence
  Description of Artificial Sequence: Synthetic peptide
WLEQEWAQIQCEVYGAGCRS

SEQ ID NO: 984 - protein, 20 aa, Artificial Sequence
  Description of Artificial Sequence: Synthetic peptide
SLEQEWAWVQCVVYGRGCPI

SEQ ID NO: 985 - protein, 20 aa, Artificial Sequence
  Description of Artificial Sequence: Synthetic peptide
WLEQEWDQVLCEVYGRGCPY

SEQ ID NO: 986 - protein, 20 aa, Artificial Sequence
  Description of Artificial Sequence: Synthetic peptide
  MOD_RES (10): Unknown amino acid
  MOD_RES (20): Unknown amino acid
WLEQEWAQVXCEVYGRGCAX

SEQ ID NO: 987 - protein, 20 aa, Artificial Sequence
  Description of Artificial Sequence: Synthetic peptide
WMDQEWAWVQCEVYGRGCPS

SEQ ID NO: 988 - protein, 20 aa, Artificial Sequence
  Description of Artificial Sequence: Synthetic peptide
QLDQEWAWIQCEVYGRNCRT

SEQ ID NO: 989 - protein, 20 aa, Artificial Sequence
  Description of Artificial Sequence: Synthetic peptide
TLEQEWAQVICEVYGRGCLS

SEQ ID NO: 990 - protein, 20 aa, Artificial Sequence
  Description of Artificial Sequence: Synthetic peptide
RLEQEWAQVQCEVWGRGCLS

SEQ ID NO: 991 - protein, 20 aa, Artificial Sequence
  Description of Artificial Sequence: Synthetic peptide
WLDQEWALVQCEVYGRGCPA

SEQ ID NO: 992 - protein, 20 aa, Artificial Sequence
  Description of Artificial Sequence: Synthetic peptide
WLDQEWAQIQCHVWGRGCPA

SEQ ID NO: 993 - protein, 20 aa, Artificial Sequence
  Description of Artificial Sequence: Synthetic peptide
WLEQEWAWVQCEVYGRGCPS

SEQ ID NO: 994 - protein, 20 aa, Artificial Sequence
  Description of Artificial Sequence: Synthetic peptide
RLEEEWAWVQCQVYGRGCPS

SEQ ID NO: 995 - protein, 20 aa, Artificial Sequence
  Description of Artificial Sequence: Synthetic peptide
WLEQEWVRIQCEVYGRGCPS

SEQ ID NO: 996 - protein, 20 aa, Artificial Sequence
  Description of Artificial Sequence: Synthetic peptide
WLEQEWTWVQCEVYGCGCPS

SEQ ID NO: 997 - protein, 20 aa, Artificial Sequence
  Description of Artificial Sequence: Synthetic peptide
WLEKEWAGVQCEIYGRGCPS

SEQ ID NO: 998 - protein, 20 aa, Artificial Sequence
  Description of Artificial Sequence: Synthetic peptide
WLEEEWAWVRCEVYGRGCQS

SEQ ID NO: 999 - protein, 20 aa, Artificial Sequence
  Description of Artificial Sequence: Synthetic peptide
WLEHEWAQIQCELYGRGCTY

SEQ ID NO: 1000 - protein, 20 aa, Artificial Sequence
  Description of Artificial Sequence: Synthetic peptide
ALEEEWAWVQCEVYGRGCPS

SEQ ID NO: 1001 - protein, 20 aa, Artificial Sequence
  Description of Artificial Sequence: Synthetic peptide
WLEQEWAQVQCEVYGRGCPS

SEQ ID NO: 1002 - protein, 20 aa, Artificial Sequence
  Description of Artificial Sequence: Synthetic peptide
WLDDEWAQIQCEIYGRGCQS

SEQ ID NO: 1003 - protein, 20 aa, Artificial Sequence
  Description of Artificial Sequence: Synthetic peptide
QLEEEWAGVQCEVYGRECPS

SEQ ID NO: 1004 - protein, 20 aa, Artificial Sequence
  Description of Artificial Sequence: Synthetic peptide
WLEQEWLLVQCGVYGRGCPS

SEQ ID NO: 1005 - protein, 20 aa, Artificial Sequence
  Description of Artificial Sequence: Synthetic peptide
WLDQEWAWIQCEVYGRGCRS

SEQ ID NO: 1006 - protein, 20 aa, Artificial Sequence
  Description of Artificial Sequence: Synthetic peptide
WLEQEWAQVQCEVSGRGCPS

SEQ ID NO: 1007 - protein, 20 aa, Artificial Sequence
  Description of Artificial Sequence: Synthetic peptide
  MOD_RES (2): Unknown amino acid
WXDQEWALIQCEVYGRGCPS

SEQ ID NO: 1008 - protein, 20 aa, Artificial Sequence
  Description of Artificial Sequence: Synthetic peptide
SLDEEWAGVLCEVYGRGCPF

SEQ ID NO: 1009 - protein, 20 aa, Artificial Sequence
  Description of Artificial Sequence: Synthetic peptide
SVDQELEWLMCHFQGRVCPS

SEQ ID NO: 1010 - protein, 20 aa, Artificial Sequence
  Description of Artificial Sequence: Synthetic peptide
WLEQERAWIWCEIQGSGCRA

SEQ ID NO: 1011 - protein, 20 aa, Artificial Sequence
  Description of Artificial Sequence: Synthetic peptide
WVNQALGGVQSDVQGRRCQS

SEQ ID NO: 1012 - protein, 20 aa, Artificial Sequence
  Description of Artificial Sequence: Synthetic peptide
LLDHEWPWVGCEVCGRGSLS

SEQ ID NO: 1013 - protein, 20 aa, Artificial Sequence
  Description of Artificial Sequence: Synthetic peptide
WLHQELAWVRGEGYPRGRRS

SEQ ID NO: 1014 - protein, 20 aa, Artificial Sequence
  Description of Artificial Sequence: Synthetic peptide
WLGHDWAWIQCEVYGLGCPC

SEQ ID NO: 1015 - protein, 20 aa, Artificial Sequence
  Description of Artificial Sequence: Synthetic peptide
  MOD_RES (14): Unknown amino acid; translation read-through at TGA stop codon
WIDQEGVRVQCEAXGRAFPS

SEQ ID NO: 1016 - protein, 20 aa, Artificial Sequence
  Description of Artificial Sequence: Synthetic peptide
WRDEEWAWVQGVVQGRGWPA

SEQ ID NO: 1017 - protein, 20 aa, Artificial Sequence
  Description of Artificial Sequence: Synthetic peptide
RLGVEWSWFQRKVYGRDSTS

SEQ ID NO: 1018 - protein, 20 aa, Artificial Sequence
  Description of Artificial Sequence: Synthetic peptide
WLAQGWAGVQCVVYGRGCRN

SEQ ID NO: 1019 - protein, 20 aa, Artificial Sequence
  Description of Artificial Sequence: Synthetic peptide
  MOD_RES (6): Unknown amino acid; translation read-through at TGA stop codon
  MOD_RES (14): Unknown amino acid
WLEEEXAGIQCQVXGRGCPS

SEQ ID NO: 1020 - protein, 20 aa, Artificial Sequence
  Description of Artificial Sequence: Synthetic peptide
WLDQEWEWVQCEVWGRGCLS

SEQ ID NO: 1021 - protein, 20 aa, Artificial Sequence
  Description of Artificial Sequence: Synthetic peptide
RLEQEWALIQCEVYGRGCPS

SEQ ID NO: 1022 - protein, 20 aa, Artificial Sequence
  Description of Artificial Sequence: Synthetic peptide
WLEEEWAQVQCQVYGRGCAS

SEQ ID NO: 1023 - protein, 20 aa, Artificial Sequence
  Description of Artificial Sequence: Synthetic peptide
  MOD_RES (6): Unknown amino acid; translation read-through at TGA stop codon
WLDLEXEWLQCEVYGRGCAT

SEQ ID NO: 1024 - protein, 20 aa, Artificial Sequence
  Description of Artificial Sequence: Synthetic peptide
WLEQEWVQVRCEVYGRGCPS

SEQ ID NO: 1025 - protein, 20 aa, Artificial Sequence
  Description of Artificial Sequence: Synthetic peptide
WLEEEWAQVQCEVYGRGCPS

SEQ ID NO: 1026 - protein, 20 aa, Artificial Sequence
  Description of Artificial Sequence: Synthetic peptide
WLDQEWARVQCEVWGRGCTY

SEQ ID NO: 1027 - protein, 20 aa, Artificial Sequence
  Description of Artificial Sequence: Synthetic peptide
  MOD_RES (4): Unknown amino acid
YLDXEWAWVQCEVYGLGCQS

SEQ ID NO: 1028 - protein, 20 aa, Artificial Sequence
  Description of Artificial Sequence: Synthetic peptide
  MOD_RES (6): Unknown amino acid; translation read-through at TGA stop codon
WLDVEXAWVQCEVWGRGCPS

SEQ ID NO: 1029 - protein, 20 aa, Artificial Sequence
  Description of Artificial Sequence: Synthetic peptide
  MOD_RES (9): Unknown amino acid
WLEQEWERXQCEVYGRGCPP

SEQ ID NO: 1030 - protein, 20 aa, Artificial Sequence
  Description of Artificial Sequence: Synthetic peptide
WLEEEWAQVQCEVYGRGCLS

SEQ ID NO: 1031 - protein, 20 aa, Artificial Sequence
  Description of Artificial Sequence: Synthetic peptide
WLDQEWAWIQCEVYGRGCPS

SEQ ID NO: 1032 - protein, 20 aa, Artificial Sequence
  Description of Artificial Sequence: Synthetic peptide
  MOD_RES (1): Unknown amino acid
  MOD_RES (14): Unknown amino acid
XLEHEWAQIQCEVXGRGCQS

SEQ ID NO: 1033 - protein, 20 aa, Artificial Sequence
  Description of Artificial Sequence: Synthetic peptide
  MOD_RES (3): Unknown amino acid
WLXQEWAWIQCEVYGRGCPF

SEQ ID NO: 1034 - protein, 20 aa, Artificial Sequence
  Description of Artificial Sequence: Synthetic peptide
  MOD_RES (4): Unknown amino acid
WLDXEWAWVQCEVYGRGCPS

SEQ ID NO: 1035 - protein, 20 aa, Artificial Sequence
  Description of Artificial Sequence: Synthetic peptide
GLEQGCPWVGLEVQCRGCPS

SEQ ID NO: 1036 - protein, 20 aa, Artificial Sequence
  Description of Artificial Sequence: Synthetic peptide
WLEEEWAWVQCEVYGHGCPS

SEQ ID NO: 1037 - protein, 20 aa, Artificial Sequence
  Description of Artificial Sequence: Synthetic peptide
WLDQEWAQIQCEVYGRGCSS

SEQ ID NO: 1038 - protein, 20 aa, Artificial Sequence
  Description of Artificial Sequence: Synthetic peptide
WLDQEWAQVQCEVWGRGCPS

SEQ ID NO: 1039 - protein, 20 aa, Artificial Sequence
  Description of Artificial Sequence: Synthetic peptide
WLDLEWEFVQCEVYGRGCPT

SEQ ID NO: 1040 - protein, 20 aa, Artificial Sequence
  Description of Artificial Sequence: Synthetic peptide
WLEQEWASVQCEVYGRGCPS

SEQ ID NO: 1041 - protein, 20 aa, Artificial Sequence
  Description of Artificial Sequence: Synthetic peptide
WLDLEWEQIKCKVYGRGCPF

SEQ ID NO: 1042 - protein, 20 aa, Artificial Sequence
  Description of Artificial Sequence: Synthetic peptide
WLEQEWAQIQCQIYGRGCPS

SEQ ID NO: 1043 - protein, 20 aa, Artificial Sequence
  Description of Artificial Sequence: Synthetic peptide
WLEQEWALVLCEVYGHGCPA

SEQ ID NO: 1044 - protein, 20 aa, Artificial Sequence
  Description of Artificial Sequence: Synthetic peptide
WLEQEWAQIQCEVWGRGCSS

SEQ ID NO: 1045 - protein, 20 aa, Artificial Sequence
  Description of Artificial Sequence: Synthetic peptide
  MOD_RES (4): Unknown amino acid
  MOD_RES (19): Unknown amino acid
WLEXEWEWVQCEVYGRGCXS

SEQ ID NO: 1046 - protein, 20 aa, Artificial Sequence
  Description of Artificial Sequence: Synthetic peptide
WLEQEWAQVQCDVYGRGCPS

SEQ ID NO: 1047 - protein, 20 aa, Artificial Sequence
  Description of Artificial Sequence: Synthetic peptide
  MOD_RES (6): Unknown amino acid; translation read-through at TGA stop codon
WLEQEXARVQCEVWGRGCPS

SEQ ID NO: 1048 - protein, 20 aa, Artificial Sequence
  Description of Artificial Sequence: Synthetic peptide
  MOD_RES (3): Unknown amino acid
  MOD_RES (18): Unknown amino acid
WLXQEWARVHCEVWGRPXQC

SEQ ID NO: 1049 - protein, 20 aa, Artificial Sequence
  Description of Artificial Sequence: Synthetic peptide
PLEHEWAWVQCVVYGRGCRS

SEQ ID NO: 1050 - protein, 20 aa, Artificial Sequence
  Description of Artificial Sequence: Synthetic peptide
  MOD_RES (4): Unknown amino acid
  MOD_RES (14): Unknown amino acid
  MOD_RES (20): Unknown amino acid
SLEXEWAWVQCEVXGRGCPX

SEQ ID NO: 1051 - protein, 20 aa, Artificial Sequence
  Description of Artificial Sequence: Synthetic peptide
WLDQEWVRVQCEVWGRGCPS

SEQ ID NO: 1052 - protein, 20 aa, Artificial Sequence
  Description of Artificial Sequence: Synthetic peptide
SLDKEWAWVKCEVYGRGCPS

SEQ ID NO: 1053 - protein, 20 aa, Artificial Sequence
  Description of Artificial Sequence: Synthetic peptide
  MOD_RES (14): Unknown amino acid; translation read-through at TAA stop codon
LGDQEWAWVEWEVXGRGWPS

SEQ ID NO: 1054 - protein, 20 aa, Artificial Sequence
  Description of Artificial Sequence: Synthetic peptide
WLEEEWAQIRCGVYGRGCPS

SEQ ID NO: 1055 - protein, 20 aa, Artificial Sequence
  Description of Artificial Sequence: Synthetic peptide
  MOD_RES (6): Unknown amino acid; translation read-through at TGA stop codon
WLEEEXGWVQCEVWGRGCPP

SEQ ID NO: 1056 - protein, 20 aa, Artificial Sequence
  Description of Artificial Sequence: Synthetic peptide
  MOD_RES (8): Unknown amino acid
CLDQEWAXVQCPVYGRGCPS

SEQ ID NO: 1057 - protein, 20 aa, Artificial Sequence
  Description of Artificial Sequence: Synthetic peptide
QLELEWARVQCEVWDRGCPS

SEQ ID NO: 1058 - protein, 20 aa, Artificial Sequence
  Description of Artificial Sequence: Synthetic peptide
RLEQEWAWIQCEVYGRGCRF

SEQ ID NO: 1059 - protein, 20 aa, Artificial Sequence
  Description of Artificial Sequence: Synthetic peptide
  MOD_RES (6): Unknown amino acid; translation read-through at TGA stop codon
  MOD_RES (19): Unknown amino acid
SLEHEXAWVQCKVYGRGCXS

SEQ ID NO: 1060 - protein, 20 aa, Artificial Sequence
  Description of Artificial Sequence: Synthetic peptide
WLDQEWAWIQCEVYGRGCPP

SEQ ID NO: 1061 - protein, 20 aa, Artificial Sequence
  Description of Artificial Sequence: Synthetic peptide
WLDQEWAQVRCEVYGRGCPS

SEQ ID NO: 1062 - protein, 20 aa, Artificial Sequence
  Description of Artificial Sequence: Synthetic peptide
PKGTRFRGDVDVWDGYSWLA

SEQ ID NO: 1063 - protein, 20 aa, Artificial Sequence
  Description of Artificial Sequence: Synthetic peptide
TPIPAGGINIASWGGYTWLS

SEQ ID NO: 1064 - protein, 20 aa, Artificial Sequence
  Description of Artificial Sequence: Synthetic peptide
HRGTVTGVWVARWPGYEWLS

SEQ ID NO: 1065 - protein, 20 aa, Artificial Sequence
  Description of Artificial Sequence: Synthetic peptide
SDVWAQPQRRNDWPGYHWLS

SEQ ID NO: 1066 - protein, 20 aa, Artificial Sequence
  Description of Artificial Sequence: Synthetic peptide
HRGTVTGVWVARWPGYEWLS

SEQ ID NO: 1067 - protein, 20 aa, Artificial Sequence
  Description of Artificial Sequence: Synthetic peptide
SDVWAQPQRRNDWPGYHWLS

SEQ ID NO: 1068 - protein, 20 aa, Artificial Sequence
  Description of Artificial Sequence: Synthetic peptide
RPHRINPQDDAVWPGYLWLG

SEQ ID NO: 1069 - protein, 20 aa, Artificial Sequence
  Description of Artificial Sequence: Synthetic peptide
HRGTVTGVWVARWPGYEWLS

SEQ ID NO: 1070 - protein, 20 aa, Artificial Sequence
  Description of Artificial Sequence: Synthetic peptide
FGRGYGGDGGGYWSGYEWLA

SEQ ID NO: 1071 - protein, 21 aa, Artificial Sequence
  Description of Artificial Sequence: Synthetic peptide
  MOD_RES (20): Unknown amino acid
DGLVVKSGREWPGYGWLERXA

SEQ ID NO: 1072 - protein, 20 aa, Artificial Sequence
  Description of Artificial Sequence: Synthetic peptide
  MOD_RES (6): Unknown amino acid
DGSIVXVSSSVGWPGYEWLM

SEQ ID NO: 1073 - protein, 20 aa, Artificial Sequence
  Description of Artificial Sequence: Synthetic peptide
WQQANLSNGGGRWGGYDWLM

SEQ ID NO: 1074 - protein, 20 aa, Artificial Sequence
  Description of Artificial Sequence: Synthetic peptide
FGRGYGGDGGGYWSGYEWLA

SEQ ID NO: 1075 - protein, 20 aa, Artificial Sequence
  Description of Artificial Sequence: Synthetic peptide
VNYEMDRVPPMPWGGYWWLS

SEQ ID NO: 1076 - protein, 20 aa, Artificial Sequence
  Description of Artificial Sequence: Synthetic peptide
MGGGLWVGVHIWPGYSWLSQ

SEQ ID NO: 1077 - protein, 20 aa, Artificial Sequence
  Description of Artificial Sequence: Synthetic peptide
SDVWAQPQRRNDWPGYHWLS

SEQ ID NO: 1078 - protein, 20 aa, Artificial Sequence
  Description of Artificial Sequence: Synthetic peptide
WPGYLFFEEALQDWRGSTED

SEQ ID NO: 1079 - protein, 20 aa, Artificial Sequence
  Description of Artificial Sequence: Synthetic peptide
SMFVAGSDRWPGYGVLADWL

SEQ ID NO: 1080 - protein, 20 aa, Artificial Sequence
  Description of Artificial Sequence: Synthetic peptide
VRGFQGGTVWPGYEWLRNAA

SEQ ID NO: 1081 - protein, 20 aa, Artificial Sequence
  Description of Artificial Sequence: Synthetic peptide
LDLASGDSWLGYDVLRGWLS

SEQ ID NO: 1082 - protein, 20 aa, Artificial Sequence
  Description of Artificial Sequence: Synthetic peptide
IHSSDGIGAWGGYAWFRDVA

SEQ ID NO: 1083 - protein, 20 aa, Artificial Sequence
  Description of Artificial Sequence: Synthetic peptide
LGPLLRWGSEVCGVWPDLCE

SEQ ID NO: 1084 - protein, 20 aa, Artificial Sequence
  Description of Artificial Sequence: Synthetic peptide
PFGFGGRWWGIPRMWWYRNS

SEQ ID NO: 1085 - protein, 20 aa, Artificial Sequence
  Description of Artificial Sequence: Synthetic peptide
WWWGGRNRWWLERWGLGGER

SEQ ID NO: 1086 - protein, 20 aa, Artificial Sequence
  Description of Artificial Sequence: Synthetic peptide
GRVALWGPVWPRWWFMSRPV

SEQ ID NO: 1087 - protein, 39 aa, Artificial Sequence
  Description of Artificial Sequence: Synthetic peptide
RGTRTDRLWKSGGFAIVPRWPCFSYHCLVEWITKTGSPG

SEQ ID NO: 1088 - protein, 32 aa, Artificial Sequence
  Description of Artificial Sequence: Synthetic peptide
GRTSMAFVPPRHLQPELAPRPVRNHAWLVGGG

SEQ ID NO: 1089 - protein, 20 aa, Artificial Sequence
  Description of Artificial Sequence: Synthetic peptide
CLGAGSFRAGILCLGGLPVS

SEQ ID NO: 1090 - protein, 20 aa, Artificial Sequence
  Description of Artificial Sequence: Synthetic peptide
GFWATACGGLQICEELGLKP

SEQ ID NO: 1091 - protein, 20 aa, Artificial Sequence
  Description of Artificial Sequence: Synthetic peptide
DLFCAYMAQALGLGQDLSCG

SEQ ID NO: 1092 - protein, 19 aa, Artificial Sequence
  Description of Artificial Sequence: Synthetic peptide
  MOD_RES (13): Unknown amino acid; translation read-through at TGA stop codon
RHLLLPQIWIASXGGWGMG

SEQ ID NO: 1093 - protein, 25 aa, Artificial Sequence
  Description of Artificial Sequence: Synthetic peptide
DHRLCGTDEYLMQDLFVRGLCRLIW

SEQ ID NO: 1094 - protein, 25 aa, Artificial Sequence
  Description of Artificial Sequence: Synthetic peptide
GLLFCKQLFTLAGLQPEAGCVSSSR

SEQ ID NO: 1095 - protein, 25 aa, Artificial Sequence
  Description of Artificial Sequence: Synthetic peptide
IWIACLDELLRGQVWSSCRRRAPIG

SEQ ID NO: 1096 - protein, 25 aa, Artificial Sequence
  Description of Artificial Sequence: Synthetic peptide
DWLRCLGVILSGGLTELANTGCVQG

SEQ ID NO: 1097 - protein, 25 aa, Artificial Sequence
  Description of Artificial Sequence: Synthetic peptide
WFSFCLGGLLQAQEWSVWGRDVGCI

SEQ ID NO: 1098 - protein, 25 aa, Artificial Sequence
  Description of Artificial Sequence: Synthetic peptide
GYSWLRDVLMEKQAQLKREGSVGRQ

SEQ ID NO: 1099 - protein, 25 aa, Artificial Sequence
  Description of Artificial Sequence: Synthetic peptide
  MOD_RES (13): Unknown amino acid; translation read-through at TGA stop codon
FLTRLLERLGLSXERGEAGGPYAQA

SEQ ID NO: 1100 - protein, 25 aa, Artificial Sequence
  Description of Artificial Sequence: Synthetic peptide
FSGFCMGLERLSQVSLGYCGAGQGG

SEQ ID NO: 1101 - protein, 25 aa, Artificial Sequence
  Description of Artificial Sequence: Synthetic peptide
ISFRCQLFVLAGMHPCPVDVGGEGF

SEQ ID NO: 1102 - protein, 25 aa, Artificial Sequence
  Description of Artificial Sequence: Synthetic peptide
NTPNCSQDWGQESGFMALLLALTCK

SEQ ID NO: 1103 - protein, 25 aa, Artificial Sequence
  Description of Artificial Sequence: Synthetic peptide
LQGFCELLATVTGVTGLGCLDYQPI

SEQ ID NO: 1104 - protein, 25 aa, Artificial Sequence
  Description of Artificial Sequence: Synthetic peptide
GSSICNLLARAQIVELALCEMGVQE

SEQ ID NO: 1105 - protein, 23 aa, Artificial Sequence
  Description of Artificial Sequence: Synthetic peptide
LSFACLLSQLSGVVLPDCLLGED

SEQ ID NO: 1106 - protein, 25 aa, Artificial Sequence
  Description of Artificial Sequence: Synthetic peptide
GEHFCQLLMSLCGDDCGPVNCGGGS

SEQ ID NO: 1107 - protein, 25 aa, Artificial Sequence
  Description of Artificial Sequence: Synthetic peptide
GWFECLLASLVLQVPQGRSRASAVC

SEQ ID NO: 1108 - protein, 25 aa, Artificial Sequence
  Description of Artificial Sequence: Synthetic peptide
YRQECACSVGAVGFLCGLACLARSG

SEQ ID NO: 1109 - protein, 40 aa, Artificial Sequence
  Description of Artificial Sequence: Synthetic peptide
LSCLAYSRHGIWRPSTDLGLGRSVGEGSVSTRWRGYDWFE

SEQ ID NO: 1110 - protein, 39 aa, Artificial Sequence
  Description of Artificial Sequence: Synthetic peptide
  MOD_RES (19): Unknown amino acid
GLDHSDAVGVHLGFAWPAXARGRWEAGGLEDTWAGYDWL

SEQ ID NO: 1111 - protein, 8 aa, Artificial Sequence
  Description of Artificial Sequence: Synthetic peptide
  MOD_RES (2): Unknown amino acid
WXGYAWLS

SEQ ID NO: 1112 - protein, 40 aa, Artificial Sequence; identical to SEQ ID NO: 1109
  Description of Artificial Sequence: Synthetic peptide

SEQ ID NO: 1113 - protein, 40 aa, Artificial Sequence
  Description of Artificial Sequence: Synthetic peptide
  MOD_RES (31): Unknown amino acid
EAMAVGLQCPARFVRAAAHGDGGSWGQDHVXAWGGYWWLG

SEQ ID NO: 1114 - protein, 20 aa, Artificial Sequence
  Description of Artificial Sequence: Synthetic peptide
HLCVLEELFWGASLFGYCSG

SEQ ID NO: 1115 - protein, 20 aa, Artificial Sequence
  Description of Artificial Sequence: Synthetic peptide
HFYVLVERLSGASLFGSGSA

SEQ ID NO: 1116 - protein, 20 aa, Artificial Sequence
  Description of Artificial Sequence: Synthetic peptide
HRFVREGLLWGAYQFCYCSG

SEQ ID NO: 1117 - protein, 20 aa, Artificial Sequence
  Description of Artificial Sequence: Synthetic peptide
FQSLLEELVWGAPLFRYGTG

SEQ ID NO: 1118 - protein, 20 aa, Artificial Sequence
  Description of Artificial Sequence: Synthetic peptide
HLSVLEELSWGASLFGQWAG

SEQ ID NO: 1119 - protein, 20 aa, Artificial Sequence
  Description of Artificial Sequence: Synthetic peptide
HLSVLEELSWGASLFGQWAG

SEQ ID NO: 1120 - protein, 20 aa, Artificial Sequence
  Description of Artificial Sequence: Synthetic peptide
NLCRLEELAWGASLFGQCAG

SEQ ID NO: 1121 - protein, 20 aa, Artificial Sequence
  Description of Artificial Sequence: Synthetic peptide
APVSTEELRWGALLFGQWAG

SEQ ID NO: 1122 - protein, 20 aa, Artificial Sequence
  Description of Artificial Sequence: Synthetic peptide
HLSVLEERWWRESLFGQWAG

SEQ ID NO: 1123 - protein, 20 aa, Artificial Sequence
  Description of Artificial Sequence: Synthetic peptide
HLSVLEERWWRAALFGQWAG

SEQ ID NO: 1124 - protein, 20 aa, Artificial Sequence
  Description of Artificial Sequence: Synthetic peptide
HLSILEEQWWRESLFGQWAG

SEQ ID NO: 1125 - protein, 19 aa, Artificial Sequence
  Description of Artificial Sequence: Synthetic peptide
HMSVEELSWWASLFGKQAG

SEQ ID NO: 1126 - protein, 20 aa, Artificial Sequence
  Description of Artificial Sequence: Synthetic peptide
HLSELEERWWRATLFGQWAG

SEQ ID NO: 1127 - protein, 20 aa, Artificial Sequence
  Description of Artificial Sequence: Synthetic peptide
HLSVLEELWWRESLFGQWAG

SEQ ID NO: 1128 - protein, 20 aa, Artificial Sequence
  Description of Artificial Sequence: Synthetic peptide
HLSLLEEQWWRESLFGQWAG

SEQ ID NO: 1129 - protein, 20 aa, Artificial Sequence
  Description of Artificial Sequence: Synthetic peptide
HLSVLEERWWRETLFGQWAG

SEQ ID NO: 1130 - protein, 20 aa, Artificial Sequence
  Description of Artificial Sequence: Synthetic peptide
HLSVLEEQWWRESLFGQWAG

SEQ ID NO: 1131 - protein, 20 aa, Artificial Sequence
  Description of Artificial Sequence: Synthetic peptide
  MOD_RES (11): Unknown amino acid
HLSVLEEQWWXESLFGQWAG

SEQ ID NO: 1132 - protein, 20 aa, Artificial Sequence
  Description of Artificial Sequence: Synthetic peptide
HLSVLEELWWREALFGQWAG

SEQ ID NO: 1133 - protein, 20 aa, Artificial Sequence
  Description of Artificial Sequence: Synthetic peptide
HLSVLEERWWRATLFGEWAG

SEQ ID NO: 1134 - protein, 20 aa, Artificial Sequence
  Description of Artificial Sequence: Synthetic peptide
  MOD_RES (3): Unknown amino acid
HLXVLEELLWGVSLFRQWAG

SEQ ID NO: 1135 - protein, 20 aa, Artificial Sequence
  Description of Artificial Sequence: Synthetic peptide
HLSALEEQWWRATLFGQWAG

SEQ ID NO: 1136 - protein, 19 aa, Artificial Sequence
  Description of Artificial Sequence: Synthetic peptide
HLSVLEERWWRATLLESGQ

SEQ ID NO: 1137 - protein, 20 aa, Artificial Sequence
  Description of Artificial Sequence: Synthetic peptide
HLSALEELWWRETLFGQWAG

SEQ ID NO: 1138 - protein, 20 aa, Artificial Sequence
  Description of Artificial Sequence: Synthetic peptide
HLSVLEELWWRESLFGKWAG

SEQ ID NO: 1139 - protein, 20 aa, Artificial Sequence
  Description of Artificial Sequence: Synthetic peptide
HLSVLEEAWWRESLFGHWAG

SEQ ID NO: 1140 - protein, 20 aa, Artificial Sequence
  Description of Artificial Sequence: Synthetic peptide
HMSEQEELWWRATLFGQWAG

SEQ ID NO: 1141 - protein, 20 aa, Artificial Sequence
  Description of Artificial Sequence: Synthetic peptide
HLSVLEERWWRETLFGEWAG

SEQ ID NO: 1142 - protein, 20 aa, Artificial Sequence
  Description of Artificial Sequence: Synthetic peptide
HRSVLKQLSWGASLFGQWAG

SEQ ID NO: 1143 - protein, 20 aa, Artificial Sequence
  Description of Artificial Sequence: Synthetic peptide
  MOD_RES (3): Unknown amino acid; translation read-through at TGA stop codon
HLXVLEELSWGASLVGQWAV

SEQ ID NO: 1144 - protein, 20 aa, Artificial Sequence
  Description of Artificial Sequence: Synthetic peptide
  MOD_RES (9): Unknown amino acid; translation read-through at TGA stop codon
HLSVLEELXLGASMFGLWAG

SEQ ID NO: 1145 - protein, 20 aa, Artificial Sequence
  Description of Artificial Sequence: Synthetic peptide
  MOD_RES (11): Unknown amino acid; translation read-through at TGA stop codon
HLSVLKELSWXASLFGQWAG

SEQ ID NO: 1146 - protein, 20 aa, Artificial Sequence
  Description of Artificial Sequence: Synthetic peptide
HLSALEELSWGASLFGQWAG

SEQ ID NO: 1147 - protein, 20 aa, Artificial Sequence
  Description of Artificial Sequence: Synthetic peptide
  MOD_RES (10): Unknown amino acid; translation read-through at TGA stop codon
HLSVLAELSXGALLFGQWAG

SEQ ID NO: 1148 - protein, 20 aa, Artificial Sequence
  Description of Artificial Sequence: Synthetic peptide
RLSVLEQLSWGASLFGPWAG

SEQ ID NO: 1149 - protein, 20 aa, Artificial Sequence
  Description of Artificial Sequence: Synthetic peptide
  MOD_RES (3): Unknown amino acid; translation read-through at TGA stop codon
HLXVLVQPSWGASLFGQWAG

SEQ ID NO: 1150 - protein, 20 aa, Artificial Sequence
  Description of Artificial Sequence: Synthetic peptide
  MOD_RES (11): Unknown amino acid; translation read-through at TGA stop codon
HQSVLEELSRXASLFGQWAG

SEQ ID NO: 1151 - protein, 20 aa, Artificial Sequence
  Description of Artificial Sequence: Synthetic peptide
  MOD_RES (13): Unknown amino acid; translation read-through at TGA stop codon
DMSVLGGLSWGAXLFGQWSG

SEQ ID NO: 1152 - protein, 20 aa, Artificial Sequence
  Description of Artificial Sequence: Synthetic peptide
HLSVREGQLWRASMFGRWAG

SEQ ID NO: 1153 - protein, 20 aa, Artificial Sequence
  Description of Artificial Sequence: Synthetic peptide
  MOD_RES (9): Unknown amino acid; translation read-through at TGA stop codon
QLSVLVELXWGASLFGPWAA

SEQ ID NO: 1154 - protein, 20 aa, Artificial Sequence
  Description of Artificial Sequence: Synthetic peptide
  MOD_RES (11): Unknown amino acid; translation read-through at TGA stop codon
HLSVGEELSWXVALLGQWAR

SEQ ID NO: 1155 - protein, 24 aa, Artificial Sequence
  Description of Artificial Sequence: Synthetic peptide
KIGGQGQHQDGNFYDWFVEALAKK

SEQ ID NO: 1156 - protein, 23 aa, Artificial Sequence
  Description of Artificial Sequence: Synthetic peptide
KVLQARHGCDSVSDCFYEWFAKK

SEQ ID NO: 1157 - protein, 23 aa, Artificial Sequence
  Description of Artificial Sequence: Synthetic peptide
KWSALLSVMDTGFYAWFDDAVKK

SEQ ID NO: 1158 - protein, 23 aa, Artificial Sequence
  Description of Artificial Sequence: Synthetic peptide
KGHSWALVRHVDRLFYEWFDLKK

SEQ ID NO: 1159 - protein, 23 aa, Artificial Sequence
  Description of Artificial Sequence: Synthetic peptide
KRDKPTDQEEQNWSFYEWFRHKK

SEQ ID NO: 1160 - protein, 24 aa, Artificial Sequence
  Description of Artificial Sequence: Synthetic peptide
KVFWNCRSQQLDFYEWWFEQAAKK

SEQ ID NO: 1161 - protein, 24 aa, Artificial Sequence
  Description of Artificial Sequence: Synthetic peptide
KLESHYVVPQAALDRLFYSWFSKK

SEQ ID NO: 1162 - protein, 23 aa, Artificial Sequence
  Description of Artificial Sequence: Synthetic peptide
KFYGWFSRQLSLTPRDDWGLPKK

SEQ ID NO: 1163 - protein, 23 aa, Artificial Sequence
  Description of Artificial Sequence: Synthetic peptide
KSAPGLVSNKQDGLFYSWFREKK

SEQ ID NO: 1164 - protein, 23 aa, Artificial Sequence
  Description of Artificial Sequence: Synthetic peptide
KRGGGTFYEWFESALRKHGAGKK

SEQ ID NO: 1165 - protein, 23 aa, Artificial Sequence
  Description of Artificial Sequence: Synthetic peptide
KDPERMQSDVGFYEWFRAAVGKK

SEQ ID NO: 1166 - protein, 27 aa, Artificial Sequence
  Description of Artificial Sequence: Synthetic peptide
DYKDCWARPCGDAANFYDWFVQQASKK

SEQ ID NO: 1167 - protein, 27 aa, Artificial Sequence
  Description of Artificial Sequence: Synthetic peptide
DYKDVTFTSAVFHENFYDWFVRQVSKK

SEQ ID NO: 1168 - protein, 12 aa, Artificial Sequence
  Description of Artificial Sequence: Synthetic peptide
SAKNFYDWFVKK

SEQ ID NO: 1169 - protein, 14 aa, Artificial Sequence
  Description of Artificial Sequence: Synthetic peptide
ADKNFYDWFMAAKK

SEQ ID NO: 1170 - protein, 23 aa, Artificial Sequence
  Description of Artificial Sequence: Synthetic peptide
DYKDLCQSWGVRIGWLAGLCPKK

SEQ ID NO: 1171 - protein, 16 aa, Artificial Sequence
  Description of Artificial Sequence: Synthetic peptide
FHENFYDWFVRQVSKK

SEQ ID NO: 1172 - protein, 26 aa, Artificial Sequence
  Description of Artificial Sequence: Synthetic peptide
DYKDFYDAIDQLVRGSARAGGTRDKK

SEQ ID NO: 1173 - protein, 23 aa, Artificial Sequence
  Description of Artificial Sequence: Synthetic peptide
KDRAFYNGLRDLVGAVYGAWDKK

SEQ ID NO: 1174 - protein, 23 aa, Artificial Sequence
  Description of Artificial Sequence: Synthetic peptide
KVRGFQGGTVWPGYEWLRNAAKK

SEQ ID NO: 1175 - protein, 23 aa, Artificial Sequence
  Description of Artificial Sequence: Synthetic peptide
KSMFVAGSDRWPGYGVLADWLKK

SEQ ID NO: 1176 - protein, 23 aa, Artificial Sequence
  Description of Artificial Sequence: Synthetic peptide
KEIEAEWGRVRCLVYGRCVGGKK

SEQ ID NO: 1177 - protein, 23 aa, Artificial Sequence
  Description of Artificial Sequence: Synthetic peptide
KWLDQEWAWVQCEVYGRGCPSKK

SEQ ID NO: 1178 - protein, 23 aa, Artificial Sequence
  Description of Artificial Sequence: Synthetic peptide
KHLCVLEELFWGASLFGYCSGKK

SEQ ID NO: 1179 - protein, 26 aa, Artificial Sequence
  Description of Artificial Sequence: Synthetic peptide
DYKDERSAAGFRGNFYDWFVAQVNKK

SEQ ID NO: 1180 - protein, 16 aa, Artificial Sequence
  Description of Artificial Sequence: Synthetic peptide
LGENFYDWFVMQVRKK

SEQ ID NO: 1181 - protein, 26 aa, Artificial Sequence
  Description of Artificial Sequence: Synthetic peptide
DYKDFYDAIDQLVRGSARAGGTRDKK

SEQ ID NO: 1182 - protein, 27 aa, Artificial Sequence
  Description of Artificial Sequence: Synthetic peptide
DYKDCWARPCGDAANFYDWFVQQASKK

SEQ ID NO: 1183 - protein, 23 aa, Artificial Sequence
  Description of Artificial Sequence: Synthetic peptide
KWLDQEWAWVQCEVYGRGCPSKK

SEQ ID NO: 1184 - protein, 19 aa, Artificial Sequence
  Description of Artificial Sequence: Synthetic peptide
KRGFQGGTVWPGYEWLRNA

SEQ ID NO: 1185 - protein, 23 aa, Artificial Sequence
  Description of Artificial Sequence: Synthetic peptide
KHLCVLEELFWGASLFGYCSGKK

SEQ ID NO: 1186 - protein, 16 aa, Artificial Sequence
  Description of Artificial Sequence: Synthetic peptide
FHENFYDWFVRQVSKK

SEQ ID NO: 1187 - protein, 20 aa, Artificial Sequence
  Description of Artificial Sequence: Synthetic peptide
RLYYEWFWGQLEAQGRGGLS

SEQ ID NO: 1188 - protein, 20 aa, Artificial Sequence
  Description of Artificial Sequence: Synthetic peptide
GLEQGCPWVGLEVQCRGCPS

SEQ ID NO: 1189 - protein, 20 aa, Artificial Sequence
  Description of Artificial Sequence: Synthetic peptide
FYCGLEELSWGAALFGYCSG

SEQ ID NO: 1190 - protein, 20 aa, Artificial Sequence
  Description of Artificial Sequence: Synthetic peptide
GNGDGMFYQLLSLLVGRDMH

SEQ ID NO: 1191 - protein, 26 aa, Artificial Sequence
  Description of Artificial Sequence: Synthetic peptide
GIISQSCPESFYDWFAGQVSDPWWCW

SEQ ID NO: 1192 - protein, 21 aa, Artificial Sequence
  Description of Artificial Sequence: Synthetic peptide
VEGRGLFYDLLRQLLARRQNG

SEQ ID NO: 1193 - protein, 19 aa, Artificial Sequence
  Description of Artificial Sequence: Synthetic peptide
RAMSFYDALVSVLGLGPKK

SEQ ID NO: 1194 - protein, 20 aa, Artificial Sequence
  Description of Artificial Sequence: Synthetic peptide
GSRPVFHEQFYEWFVDQLGL

SEQ ID NO: 1195 - protein, 20 aa, Artificial Sequence
  Description of Artificial Sequence: Synthetic peptide
RSEASFHVEFYSWFEEQLRS

SEQ ID NO: 1196 - protein, 20 aa, Artificial Sequence
  Description of Artificial Sequence: Synthetic peptide
GRFYGWFQDAIDQLMPWGFD

SEQ ID NO: 1197 - protein, 19 aa, Artificial Sequence
  Description of Artificial Sequence: Synthetic peptide
PPWGARFYDAIEQLVFDNL

SEQ ID NO: 1198 - protein, 23 aa, Artificial Sequence
  Description of Artificial Sequence: Synthetic peptide
AGVNAGFYRYFSTLLDWWDQGKK

SEQ ID NO: 1199 - protein, 27 aa, Artificial Sequence
  Description of Artificial Sequence: Synthetic peptide
TFYSCLASLLTGTPQPNRGPWERCRKK

SEQ ID NO: 1200 - protein, 17 aa, Artificial Sequence
  Description of Artificial Sequence: Synthetic peptide
AAVHEQFYDWFADQYKK

SEQ ID NO: 1201 - protein, 17 aa, Artificial Sequence
  Description of Artificial Sequence: Synthetic peptide
QSFYDYIEELLGGEWKK

SEQ ID NO: 1202 - protein, 17 aa, Artificial Sequence
  Description of Artificial Sequence: Synthetic peptide
QSFYDYIEELLGGEWEE

SEQ ID NO: 1203 - protein, 18 aa, Artificial Sequence
  Description of Artificial Sequence: Synthetic peptide
GSLDESFYDWFERQLGKK

SEQ ID NO: 1204 - protein, 18 aa, Artificial Sequence
  Description of Artificial Sequence: Synthetic peptide
GSFYEALQRLVGGEQGKK

SEQ ID NO: 1205 - protein, 17 aa, Artificial Sequence
  Description of Artificial Sequence: Synthetic peptide
QAPSNFYDWFVREWDKK

SEQ ID NO: 1206 - protein, 17 aa, Artificial Sequence
  Description of Artificial Sequence: Synthetic peptide
DPFYQGLWEWLRESGKK

SEQ ID NO: 1207 - protein, 20 aa, Artificial Sequence
  Description of Artificial Sequence: Synthetic peptide
ASGFPENFYDWFGRQLSLKK

SEQ ID NO: 1208 - protein, 20 aa, Artificial Sequence
  Description of Artificial Sequence: Synthetic peptide
SACQFDCHENFYDWFARQKK

SEQ ID NO: 1209 - protein, 20 aa, Artificial Sequence
  Description of Artificial Sequence: Synthetic peptide
SQAGSAFYAWFDQVLRTVKK

SEQ ID NO: 1210 - protein, 20 aa, Artificial Sequence
  Description of Artificial Sequence: Synthetic peptide
VMDARDDPFYHKLSELVTKK

SEQ ID NO: 1211 - protein, 20 aa, Artificial Sequence
  Description of Artificial Sequence: Synthetic peptide
QSDAFYSGLWALIGLSDGKK

SEQ ID NO: 1212 - protein, 19 aa, Artificial Sequence
  Description of Artificial Sequence: Synthetic peptide
LQPCSGFYECIERLIGVKK

SEQ ID NO: 1213 - protein, 19 aa, Artificial Sequence
  Description of Artificial Sequence: Synthetic peptide
LKDGFYDYFWQRLHLGSKK

SEQ ID NO: 1214 - protein, 19 aa, Artificial Sequence
  Description of Artificial Sequence: Synthetic peptide
GSASFYDAIDRLLRMRIKK

SEQ ID NO: 1215 - protein, 20 aa, Artificial Sequence
  Description of Artificial Sequence: Synthetic peptide
WPGYLFFEEALQDWRGSTED

SEQ ID NO: 1216 - protein, 9 aa, Artificial Sequence
  Description of Artificial Sequence: Synthetic peptide
AFYDWFAKK

SEQ ID NO: 1217 - protein, 17 aa, Artificial Sequence
  Description of Artificial Sequence: Synthetic peptide
LDALDRLMRYFEERPSL

SEQ ID NO: 1218 - protein, 20 aa, Artificial Sequence
  Description of Artificial Sequence: Synthetic peptide
PLAELWAYFEHSEQGRSSAH

SEQ ID NO: 1219 - protein, 21 aa, Artificial Sequence
  Description of Artificial Sequence: Synthetic peptide
GRVDWLQRNANFYDWFVAELG

SEQ ID NO: 1220 - protein, 21 aa, Artificial Sequence
  Description of Artificial Sequence: Synthetic peptide
NGVERAGTGDNFYDWFVAQLH

SEQ ID NO: 1221 - protein, 21 aa, Artificial Sequence
  Description of Artificial Sequence: Synthetic peptide
IGGQGQHQDGNFYDWFVEALA

SEQ ID NO: 1222 - protein, 20 aa, Artificial Sequence
  Description of Artificial Sequence: Synthetic peptide
VFWNCRSQQLDFYEWFEQAA

SEQ ID NO: 1223 - protein, 20 aa, Artificial Sequence
  Description of Artificial Sequence: Synthetic peptide
RGGGTFYEWFESALRKHGAG

SEQ ID NO: 1224 - protein, 26 aa, Artificial Sequence
  Description of Artificial Sequence: Synthetic peptide
RVAGAISAPGLVSNKQDGLFYSWFRE

SEQ ID NO: 1225 - protein, 20 aa, Artificial Sequence
  Description of Artificial Sequence: Synthetic peptide
VLQARHGCDSVSDCFYEWFA

SEQ ID NO: 1226 - protein, 20 aa, Artificial Sequence
  Description of Artificial Sequence: Synthetic peptide
DPERMQSDVGFYEWFRAAVG

SEQ ID NO: 1227 - protein, 20 aa, Artificial Sequence
  Description of Artificial Sequence: Synthetic peptide
WSALLSVMDTGFYAWFDDAV

SEQ ID NO: 1228 - protein, 20 aa, Artificial Sequence
  Description of Artificial Sequence: Synthetic peptide
DIGSDGHGRRWDSFYRWFEM

SEQ ID NO: 1229 - protein, 16 aa, Artificial Sequence
  Description of Artificial Sequence: Synthetic peptide
IGGSFVEFYGWFNDQV

SEQ ID NO: 1230 - protein, 20 aa, Artificial Sequence
  Description of Artificial Sequence: Synthetic peptide
GHSWALVRHVDRLFYEWFDL

SEQ ID NO: 1231 - protein, 20 aa, Artificial Sequence
  Description of Artificial Sequence: Synthetic peptide
LPAGGAQGFAVRGFYEWFES

SEQ ID NO: 1232 - protein, 20 aa, Artificial Sequence
  Description of Artificial Sequence: Synthetic peptide
RDKPTDQEEQNWSFYEWFRH

SEQ ID NO: 1233 - protein, 20 aa, Artificial Sequence
  Description of Artificial Sequence: Synthetic peptide
SRDQTNFTFNSAGFYGWFER

SEQ ID NO: 1234 - protein, 20 aa, Artificial Sequence
  Description of Artificial Sequence: Synthetic peptide
GAFYRWFHEALVGSERVPDV

SEQ ID NO: 1235 - protein, 20 aa, Artificial Sequence
  Description of Artificial Sequence: Synthetic peptide
RIGGGWARSEGFYEWFVREL

SEQ ID NO: 1236 - protein, 20 aa, Artificial Sequence
  Description of Artificial Sequence: Synthetic peptide
RMFYEWFWSQMGAGPTEGSA

SEQ ID NO: 1237 - protein, 20 aa, Artificial Sequence
  Description of Artificial Sequence: Synthetic peptide
HEAFYDWFSALVDGGYELMG

SEQ ID NO: 1238 - protein, 20 aa, Artificial Sequence
  Description of Artificial Sequence: Synthetic peptide
FYGWFSRQLSLTPRDDWGLP

SEQ ID NO: 1239 - protein, 17 aa, Artificial Sequence
  Description of Artificial Sequence: Synthetic peptide
GVGTLTMSSDAFYTWFV

SEQ ID NO: 1240 - protein, 20 aa, Artificial Sequence
  Description of Artificial Sequence: Synthetic peptide
LGTSAGQGVGHRAFYQWFQS

SEQ ID NO: 1241 - protein, 23 aa, Artificial Sequence
  Description of Artificial Sequence: Synthetic peptide
ETLESHYVVPQAALDRLFYSWFS

SEQ ID NO: 1242 - protein, 40 aa, Artificial Sequence; identical to SEQ ID NO: 1
  Description of Artificial Sequence: Synthetic peptide

SEQ ID NO: 1243 - protein, 40 aa, Artificial Sequence; identical to SEQ ID NO: 2
  Description of Artificial Sequence: Synthetic peptide

SEQ ID NO: 1244 - protein, 20 aa, Artificial Sequence
  Description of Artificial Sequence: Synthetic peptide
EIEAEWGRVRCLVYGRCVGG

SEQ ID NO: 1245 - protein, 20 aa, Artificial Sequence
  Description of Artificial Sequence: Synthetic peptide
WLDQEWAWVQCEVYGRGCPS

SEQ ID NO: 1246 - protein, 24 aa, Artificial Sequence
  Description of Artificial Sequence: Synthetic peptide
DYKDFYDAIDQLVRGSARAGGTRD

SEQ ID NO: 1247 - protein, 24 aa, Artificial Sequence
  Description of Artificial Sequence: Synthetic peptide
DYKDDRAFYNGLRDLVGAVYGAWD

SEQ ID NO: 1248 - protein, 24 aa, Artificial Sequence
  Description of Artificial Sequence: Synthetic peptide
DYKDRLFYCGIQALGANLGYSGCV

SEQ ID NO: 1249 - protein, 19 aa, Artificial Sequence
  Description of Artificial Sequence: Synthetic peptide
DYKDFYSALWGLCGVTGCG

SEQ ID NO: 1250 - protein, 20 aa, Artificial Sequence
  Description of Artificial Sequence: Synthetic peptide
RGQSDAFYSGLWALIGLSDG

SEQ ID NO: 1251 - protein, 41 aa, Artificial Sequence
  Description of Artificial Sequence: Synthetic peptide
RYFPFGGFYGNLDVLRWLRPYVASPRWGHWRPGGSLGKQPT

SEQ ID NO: 1252 - protein, 20 aa, Artificial Sequence
  Description of Artificial Sequence: Synthetic peptide
PFGFGGRWWGIPRMWWYRNS

SEQ ID NO: 1253 - protein, 20 aa, Artificial Sequence
  Description of Artificial Sequence: Synthetic peptide
WWWGGRNRWWLERWGLGGER

SEQ ID NO: 1254 - protein, 20 aa, Artificial Sequence
  Description of Artificial Sequence: Synthetic peptide
LGPLLRWGSEVCGVWPDLCE

SEQ ID NO: 1255 - protein, 20 aa, Artificial Sequence
  Description of Artificial Sequence: Synthetic peptide
GRVALWGPVWPRWWFMSRPV

SEQ ID NO: 1256 - protein, 20 aa, Artificial Sequence
  Description of Artificial Sequence: Synthetic peptide
SMFVAGSDRWPGYGVLADWL

SEQ ID NO: 1257 - protein, 20 aa, Artificial Sequence
  Description of Artificial Sequence: Synthetic peptide
VRGFQGGTVWPGYEWLRNAA

SEQ ID NO: 1258 - protein, 20 aa, Artificial Sequence
  Description of Artificial Sequence: Synthetic peptide
WPGYLFFEEALQDWRGSTED

SEQ ID NO: 1259 - protein, 20 aa, Artificial Sequence
  Description of Artificial Sequence: Synthetic peptide
ACSSFFVKGPEGFLQCLGSI

SEQ ID NO: 1260 - protein, 20 aa, Artificial Sequence
  Description of Artificial Sequence: Synthetic peptide
HLCVLEELFWGASLFGYCSG

SEQ ID NO: 1261 - protein, 36 aa, Artificial Sequence
  Description of Artificial Sequence: Synthetic peptide
PERGRGLRTAMQLMRRPRDWHFPHSLFWGAPPPLSG

SEQ ID NO: 1262 - protein, 36 aa, Artificial Sequence
  Description of Artificial Sequence: Synthetic peptide
PAMAVGYPQPCAKSTYERGRGSALESRCYQAAAGAP

SEQ ID NO: 1263 - protein, 36 aa, Artificial Sequence
  Description of Artificial Sequence: Synthetic peptide
  MOD_RES (9): Unknown amino acid; translation read-through at TGA stop codon
PAMACKVCXCCSVSCYDGFPRSGAHPGRRWAAAGAP

SEQ ID NO: 1264 - protein, 36 aa, Artificial Sequence
  Description of Artificial Sequence: Synthetic peptide
PAMAFKVSLSCGESFYEWFAGLVRDPTCGWTAAGAP

SEQ ID NO: 1265 - protein, 33 aa, Artificial Sequence
  Description of Artificial Sequence: Synthetic peptide
  MOD_RES (14): Unknown amino acid; translation read-through at TGA stop codon
AGHGACEFQVMFGXLVHLLGFPGRLGKGLAAGA

SEQ ID NO: 1266 - protein, 36 aa, Artificial Sequence
  Description of Artificial Sequence: Synthetic peptide
  MOD_RES (29): Unknown amino acid; translation read-through at TGA stop codon
RPWRGSWLRLVGRRVECYCAERGATRGWXCAAAGAP

SEQ ID NO: 1267 - protein, 36 aa, Artificial Sequence
  Description of Artificial Sequence: Synthetic peptide
AGHGDFGALSCKAAVVAWVPVQTAGLRVRVAAAGAP

SEQ ID NO: 1268 - protein, 36 aa, Artificial Sequence
  Description of Artificial Sequence: Synthetic peptide
PAMAPRLYQGCPESFYAWTAGHVSPALYGWAAAGAP

SEQ ID NO: 1269 - protein, 36 aa, Artificial Sequence
  Description of Artificial Sequence: Synthetic peptide
  MOD_RES (22): Unknown amino acid; translation read-through at TAA stop codon
PGHGVSVRAGVSGMLRREVAGXCVSAWEGLCGRRCA

SEQ ID NO: 1270 - protein, 36 aa, Artificial Sequence
  Description of Artificial Sequence: Synthetic peptide
  MOD_RES (10): Unknown amino acid; translation read-through at TAA stop codon
  MOD_RES (24): Unknown amino acid; translation read-through at TAA stop codon
  MOD_RES (30): Unknown amino acid; translation read-through at TAA stop codon
PAMAGMDPQXCTVASSRWFASPVXVVWRCXAAAGAP

SEQ ID NO: 1271 - protein, 36 aa, Artificial Sequence
  Description of Artificial Sequence: Synthetic peptide
PAMAGMFSQTCPEGFYGWFAGQASDSSLCRAAAGAP

SEQ ID NO: 1272 - protein, 36 aa, Artificial Sequence
  Description of Artificial Sequence: Synthetic peptide
  MOD_RES (16): Unknown amino acid; translation read-through at TGA stop codon
  MOD_RES (27): Unknown amino acid; translation read-through at TAA stop codon
PAMAPLGFRSCAGAYXVGCGRRVAFEXRCWAAAGAP

SEQ ID NO: 1273 - protein, 36 aa, Artificial Sequence
  Description of Artificial Sequence: Synthetic peptide
  MOD_RES (19): Unknown amino acid; translation read-through at TAA stop codon
PAMAGILCPSCPHFLVDSXAAQDAAGQWPSAAAGAP

SEQ ID NO: 1274 - protein, 36 aa, Artificial Sequence
  Description of Artificial Sequence: Synthetic peptide
PAMARRIPRECGDSFYVGLRWLVENPRSDWAAAGAP

SEQ ID NO: 1275 - protein, 36 aa, Artificial Sequence
  Description of Artificial Sequence: Synthetic peptide
PAMADRIGVQCPDSFYGWFAVQEPGTSGGLAAAGAP

SEQ ID NO: 1276 - protein, 31 aa, Artificial Sequence
  Description of Artificial Sequence: Synthetic peptide
  MOD_RES (9): Unknown amino acid; translation read-through at TGA stop codon
PAMAGLPSXSCRVAMYKGQAAWSCSAAAGAP

SEQ ID NO: 1277 - protein, 35 aa, Artificial Sequence
  Description of Artificial Sequence: Synthetic peptide
RPWRLILVTLVREASMTGSGVWYPRRGGAGPAEGA

SEQ ID NO: 1278 - protein, 36 aa, Artificial Sequence
  Description of Artificial Sequence: Synthetic peptide
  MOD_RES (22): Unknown amino acid; translation read-through at TGA stop codon
  MOD_RES (29): Unknown amino acid; translation read-through at TAA stop codon
PAMAGSARQVCVDGVVGWREGXVVDQWLXRAAAGAP

SEQ ID NO: 1279 - protein, 36 aa, Artificial Sequence
  Description of Artificial Sequence: Synthetic peptide
PAMAGIMQRACEGGFTDCLWSLISGASSGRAAAGAP

SEQ ID NO: 1280 - protein, 36 aa, Artificial Sequence
  Description of Artificial Sequence: Synthetic peptide
RPWRVSSLRHVRVTCGELFGGQVSELFCLCAAAGAP

SEQ ID NO: 1281 - protein, 36 aa, Artificial Sequence
  Description of Artificial Sequence: Synthetic peptide
  MOD_RES (28): Unknown amino acid; translation read-through at TAA stop codon
PAMAGLIYMSCLAYFDDLIERRLEKPGXRFAAAGAP

SEQ ID NO: 1282 - protein, 36 aa, Artificial Sequence
  Description of Artificial Sequence: Synthetic peptide
PAMAGIMPQSCGETSGKCMRGQVSLRWRWSAAAGAP

SEQ ID NO: 1283 - protein, 36 aa, Artificial Sequence
  Description of Artificial Sequence: Synthetic peptide
PAMAFILPRSCEDYLYDFLASKVVHVFRSLAAAGAP

SEQ ID NO: 1284 - protein, 35 aa, Artificial Sequence
  Description of Artificial Sequence: Synthetic peptide
PAMACMSSQPCGESFYDWFAGQVRDPGWESAAAGA

SEQ ID NO: 1285 - protein, 35 aa, Artificial Sequence
  Description of Artificial Sequence: Synthetic peptide
  MOD_RES (16): Unknown amino acid; translation read-through at TGA stop codon
  MOD_RES (30): Unknown amino acid; translation read-through at TAA stop codon
RPWRGWAIRGVRHRCXGAWRGQVAQELCRXAAAGA

SEQ ID NO: 1286 - protein, 36 aa, Artificial Sequence
  Description of Artificial Sequence: Synthetic peptide
PAMAGIASHTCPGGFYEWFACQSRAPGWDGAAAGAP

SEQ ID NO: 1287 - protein, 36 aa, Artificial Sequence
  Description of Artificial Sequence: Synthetic peptide
PAMAGRIARACPDSMFGWLAGQGSQQSGWQAAAGAP

SEQ ID NO: 1288 - protein, 36 aa, Artificial Sequence
  Description of Artificial Sequence: Synthetic peptide
  MOD_RES (12): Unknown amino acid; translation read-through at TAA stop codon
PAMARPISPLCXRRSKDEDASRVSLPGFFCAAAGAP

SEQ ID NO: 1289 - protein, 43 aa, Artificial Sequence
  Description of Artificial Sequence: Synthetic peptide
PAMADYKDDDDKTFYACLASLMAGTPRQYRTPWARCPAAAGAP

SEQ ID NO: 1290 - protein, 36 aa, Artificial Sequence
  Description of Artificial Sequence: Synthetic peptide
  MOD_RES (13): Unknown amino acid; translation read-through at TAA stop codon
  MOD_RES (29): Unknown amino acid; translation read-through at TGA stop codon
RPWRVNTSESCLXFVCSLFSGYECWVGGXWAAAGAP

SEQ ID NO: 1291 - protein, 36 aa, Artificial Sequence
  Description of Artificial Sequence: Synthetic peptide
PAMAGMGVQSCHDSFYGWFGCLFSDAEGDRAAAGAP

SEQ ID NO: 1292 - protein, 36 aa, Artificial Sequence
  Description of Artificial Sequence: Synthetic peptide
  MOD_RES (18): Unknown amino acid
PAMAGDTSRACPESLNGXFCVVGVALRRWIAAAGAP

SEQ ID NO: 1293 - protein, 36 aa, Artificial Sequence
  Description of Artificial Sequence: Synthetic peptide
PAMARWWRGLCGERWYHRGWVQVQFPWERGAAAGAP

SEQ ID NO: 1294 - protein, 34 aa, Artificial Sequence
  Description of Artificial Sequence: Synthetic peptide
RPWRVPWVLEMPEYGNANLVFYDALQRLAAAGAP

SEQ ID NO: 1295 - protein, 36 aa, Artificial Sequence
  Description of Artificial Sequence: Synthetic peptide
AGHGVCYLAGVFGEALGGGRVSGFAIGQVRAAAGAP

SEQ ID NO: 1296 - protein, 36 aa, Artificial Sequence
  Description of Artificial Sequence: Synthetic peptide
PAMAGRIKEFCSRSFYDQVACLVKGPSWGGAAAGAP

SEQ ID NO: 1297 - protein, 36 aa, Artificial Sequence; identical to SEQ ID NO: 1296
  Description of Artificial Sequence: Synthetic peptide

SEQ ID NO: 1298 - protein, 36 aa, Artificial Sequence
  Description of Artificial Sequence: Synthetic peptide
PAMAGISSRSCAENLRFGRAWQGSDVWDCLAAAGAP

SEQ ID NO: 1299 - protein, 36 aa, Artificial Sequence
  Description of Artificial Sequence: Synthetic peptide
PAMASRIPQWCRDSFYEWFECQLLGPRESRAAAGAP

SEQ ID NO: 1300 - protein, 36 aa, Artificial Sequence
  Description of Artificial Sequence: Synthetic peptide
PAMAGAESCYRAKSFYDGLGCLVGEAWWGGAAAGAP

SEQ ID NO: 1301 - protein, 36 aa, Artificial Sequence
  Description of Artificial Sequence: Synthetic peptide
PAMARSGAPRCHDPFYEWFAVEAQEPLRCEAAAGAP

SEQ ID NO: 1302 - protein, 36 aa, Artificial Sequence; identical to SEQ ID NO: 1291
  Description of Artificial Sequence: Synthetic peptide

SEQ ID NO: 1303 - protein, 36 aa, Artificial Sequence
  Description of Artificial Sequence: Synthetic peptide
PAMADISFESCLAQLLGWRAGEGSKRLWRCAAAGAP

SEQ ID NO: 1304 - protein, 36 aa, Artificial Sequence
  Description of Artificial Sequence: Synthetic peptide
PAMANTFLYPCRDPFYHSLADLVGVAMQCGAAAGAP

SEQ ID NO: 1305 - protein, 36 aa, Artificial Sequence
  Description of Artificial Sequence: Synthetic peptide
PAMARRIPRECGDSFYAGLRCLVESPRSDWAAAGAP

SEQ ID NO: 1306 - protein, 36 aa, Artificial Sequence
  Description of Artificial Sequence: Synthetic peptide
PAMASIVCPFCEDSFYNWFAAQVADTRGLWAAAGAP

SEQ ID NO: 1307 - protein, 36 aa, Artificial Sequence
  Description of Artificial Sequence: Synthetic peptide
PAMAWSHSHAYTESYYDWFAAQVLSAGSGRAAAGAP

SEQ ID NO: 1308 - protein, 36 aa, Artificial Sequence; identical to SEQ ID NO: 1296
  Description of Artificial Sequence: Synthetic peptide

SEQ ID NO: 1309 - protein, 36 aa, Artificial Sequence
  Description of Artificial Sequence: Synthetic peptide
PAMARSRPPACGDSFYGWFECEVSGLGRRGAAAGAP

SEQ ID NO: 1310 - protein, 36 aa, Artificial Sequence
  Description of Artificial Sequence: Synthetic peptide
PAMAGISYPACEESFYDCLASLVLSPWGSGAAAGAP

SEQ ID NO: 1311 - protein, 36 aa, Artificial Sequence; identical to SEQ ID NO: 1296
  Description of Artificial Sequence: Synthetic peptide

SEQ ID NO: 1312 - protein, 36 aa, Artificial Sequence
  Description of Artificial Sequence: Synthetic peptide
PAMAVVAGQYCRDSFYDRLSALVGDAWRCGAAAGAP

SEQ ID NO: 1313 - protein, 36 aa, Artificial Sequence
  Description of Artificial Sequence: Synthetic peptide
PAMACTASRFCAVSFYEWFAAQLPDLGGDSAAAGAP

SEQ ID NO: 1314 - protein, 36 aa, Artificial Sequence
  Description of Artificial Sequence: Synthetic peptide
PAMAGITLQSCGGGFYELLASVVGDTGCRLAAAGAP

SEQ ID NO: 1315 - protein, 36 aa, Artificial Sequence
  Description of Artificial Sequence: Synthetic peptide
PAMAGYICRSCQGSFYGCLAALVRDPRCSRAAAGAP

SEQ ID NO: 1316 - protein, 36 aa, Artificial Sequence; identical to SEQ ID NO: 1296
  Description of Artificial Sequence: Synthetic peptide

SEQ ID NO: 1317 - protein, 36 aa, Artificial Sequence
  Description of Artificial Sequence: Synthetic peptide
RPWRVAGAPRCHDPFYEWFAVEAQEPLRCEAAAGAP

SEQ ID NO: 1318 - protein, 36 aa, Artificial Sequence; identical to SEQ ID NO: 1291
  Description of Artificial Sequence: Synthetic peptide

SEQ ID NO: 1319 - protein, 36 aa, Artificial Sequence
  Description of Artificial Sequence: Synthetic peptide
PAMASICGQSCRDPFYAGLRGLLLEPLQLGAAAGAP

SEQ ID NO: 1320 - protein, 36 aa, Artificial Sequence
  Description of Artificial Sequence: Synthetic peptide
PAMAGVMSKCCSGSFYDWLADLVPEASWSWAAAGAP

SEQ ID NO: 1321 - protein, 36 aa, Artificial Sequence
  Description of Artificial Sequence: Synthetic peptide
PAMASFSGEACGGSFYDCLAGLMRDSSVSRAAAGAP

SEQ ID NO: 1322 - protein, 36 aa, Artificial Sequence
  Description of Artificial Sequence: Synthetic peptide
PAMASFSFYTCMETLLDGFGGQAFNRCRRTAAAGAP

SEQ ID NO: 1323 - protein, 36 aa, Artificial Sequence
  Description of Artificial Sequence: Synthetic peptide
PAMARVIYPTCPRDFYGGLAALVFGPHVCGAAAGAP

SEQ ID NO: 1324 - protein, 36 aa, Artificial Sequence
  Description of Artificial Sequence: Synthetic peptide
PAMAGIGSQACTDPFYYWFEGLVSNGGWCRAAAGAP

SEQ ID NO: 1325 - protein, 36 aa, Artificial Sequence; identical to SEQ ID NO: 1296
  Description of Artificial Sequence: Synthetic peptide

SEQ ID NO: 1326 - protein, 36 aa, Artificial Sequence; identical to SEQ ID NO: 1300
  Description of Artificial Sequence: Synthetic peptide

SEQ ID NO: 1327 - protein, 36 aa, Artificial Sequence
  Description of Artificial Sequence: Synthetic peptide
PAMADMMSQVCSQSMTGRFSVDFYDGLRCLAAAGAP

SEQ ID NO: 1328 - protein, 36 aa, Artificial Sequence; identical to SEQ ID NO: 1305
  Description of Artificial Sequence: Synthetic peptide

SEQ ID NO: 1329 - protein, 36 aa, Artificial Sequence
  Description of Artificial Sequence: Synthetic peptide
PAMARVIQEACGGSFYDGLACLVYPQGWRGAAAGAP

SEQ ID NO: 1330 - protein, 36 aa, Artificial Sequence
  Description of Artificial Sequence: Synthetic peptide
PAMAGGRSVACQESFYALLGCVVMGPGGGSAAAGAP

SEQ ID NO: 1331 - protein, 36 aa, Artificial Sequence
  Description of Artificial Sequence: Synthetic peptide
PAMAGISFRSCLQALIAGSAGNASEMGCRSAAAGAP

SEQ ID NO: 1332 - protein, 36 aa, Artificial Sequence
  Description of Artificial Sequence: Synthetic peptide
PAMAGIRDSYCQGAFYDWFAGLVDDGLFCQAAAGAP

SEQ ID NO: 1333 - protein, 36 aa, Artificial Sequence
  Description of Artificial Sequence: Synthetic peptide
PAMAGISYQSCEDSFYAWFACTVLDTRGGGAAAGAP

SEQ ID NO: 1334 - protein, 36 aa, Artificial Sequence
  Description of Artificial Sequence: Synthetic peptide
PAMARVIYEACGGSFYDGLACLVYPQGWRGAAAGAP

SEQ ID NO: 1335 - protein, 36 aa, Artificial Sequence
  Description of Artificial Sequence: Synthetic peptide
PAMADMPLLECLDPFYSWFAGQVSDPRFCGAAAGAP

SEQ ID NO: 1336 - protein, 36 aa, Artificial Sequence; identical to SEQ ID NO: 1329
  Description of Artificial Sequence: Synthetic peptide

SEQ ID NO: 1337 - protein, 36 aa, Artificial Sequence; identical to SEQ ID NO: 1296
  Description of Artificial Sequence: Synthetic peptide

SEQ ID NO: 1338 - protein, 36 aa, Artificial Sequence
  Description of Artificial Sequence: Synthetic peptide
PAMAHISFHSCLEALQDPEWGQPSAAWRNCAAAGAP

SEQ ID NO: 1339 - protein, 36 aa, Artificial Sequence
  Description of Artificial Sequence: Synthetic peptide
PAMAMTAQESCPDSFYECLAVLVGDRWGGWAAAGAP

SEQ ID NO: 1340 - protein, 36 aa, Artificial Sequence; identical to SEQ ID NO: 1338
  Description of Artificial Sequence: Synthetic peptide

SEQ ID NO: 1341 - protein, 36 aa, Artificial Sequence
  Description of Artificial Sequence: Synthetic peptide
PAMAGTISQCCEENFYAGLAHLAGVGQWGCAAAGAP

SEQ ID NO: 1342 - protein, 29 aa, Artificial Sequence
  Description of Artificial Sequence: Synthetic peptide
DDDKTFYACLEFLLSGNPEGNSGPWDRCR

SEQ ID NO: 1343 - protein, 29 aa, Artificial Sequence
  Description of Artificial Sequence: Synthetic peptide
DDDKIFYSCLASLLHGGPQRNTGPWERCR

SEQ ID NO: 1344 - protein, 29 aa, Artificial Sequence
  Description of Artificial Sequence: Synthetic peptide
DDDKTFYSCLASLLTGPREQNRGAWERCR

SEQ ID NO: 1345 - protein, 29 aa, Artificial Sequence
  Description of Artificial Sequence: Synthetic peptide
DDDKSFYSCLASLLTASRLPSRGAWDGCH

SEQ ID NO: 1346 - protein, 29 aa, Artificial Sequence
  Description of Artificial Sequence: Synthetic peptide
DDDKSFYSCLGSLLTGAPQPIRGAWDRCR

SEQ ID NO: 1347 - protein, 29 aa, Artificial Sequence
  Description of Artificial Sequence: Synthetic peptide
DDDKSFYSCLASLWSGTGGSSRGRWEGCR

SEQ ID NO: 1348 - protein, 29 aa, Artificial Sequence
  Description of Artificial Sequence: Synthetic peptide
DDDKTFYSCLGALLAGTGERNLRPWGRCR

SEQ ID NO: 1349 - protein, 29 aa, Artificial Sequence
  Description of Artificial Sequence: Synthetic peptide
DDDKTFYSCLGSLLTGPSDPKRGPWGGCR

SEQ ID NO: 1350 - protein, 29 aa, Artificial Sequence
  Description of Artificial Sequence: Synthetic peptide
DDDKTFYKCLASVLTGSTQTKRRPWEGCR

SEQ ID NO: 1351 - protein, 29 aa, Artificial Sequence
  Description of Artificial Sequence: Synthetic peptide
DDDKPFYSCLATLLTDPPQSQRGAWGRCR

SEQ ID NO: 1352 - protein, 29 aa, Artificial Sequence
  Description of Artificial Sequence: Synthetic peptide
DDDKSFYSCLAALLTGSSQSSGGAWMLCR

SEQ ID NO: 1353 - protein, 29 aa, Artificial Sequence
  Description of Artificial Sequence: Synthetic peptide
DDDKSFYSCLASLVAGTPWPKGGSWERCR

SEQ ID NO: 1354 - protein, 29 aa, Artificial Sequence
  Description of Artificial Sequence: Synthetic peptide
DDDKSFYSCLASLVTGIPRSNSGTQVFCR

SEQ ID NO: 1355 - protein, 29 aa, Artificial Sequence
  Description of Artificial Sequence: Synthetic peptide
DDDKSFYSCMASLLTGTPESRRGMGERCG

SEQ ID NO: 1356 - protein, 29 aa, Artificial Sequence
  Description of Artificial Sequence: Synthetic peptide
DDDKAFYSCLASLLTGSPPAQGGPWDRCR

SEQ ID NO: 1357 - protein, 29 aa, Artificial Sequence
  Description of Artificial Sequence: Synthetic peptide
DDDKFFYSCLASLLSDTPQRRRGPGVRCR

SEQ ID NO: 1358 - protein, 29 aa, Artificial Sequence
  Description of Artificial Sequence: Synthetic peptide
DDDKTFYSCLASLLAGNPQPNRAGWEYCR

SEQ ID NO: 1359 - protein, 29 aa, Artificial Sequence
  Description of Artificial Sequence: Synthetic peptide
DDDKTFYSCLGSLLLGPPQKNPGPGERCR

SEQ ID NO: 1360 - protein, 29 aa, Artificial Sequence
  Description of Artificial Sequence: Synthetic peptide
DDDKMFYSCLESLLIGRWPRNGGSLSRCR

SEQ ID NO: 1361 - protein, 29 aa, Artificial Sequence
  Description of Artificial Sequence: Synthetic peptide
DDDKSFYSCLTFLLTGTPQANDASWERCR

SEQ ID NO: 1362 - protein, 29 aa, Artificial Sequence
  Description of Artificial Sequence: Synthetic peptide
DDDKSFYSCMAALLSGAPQKSRGRWERCG

SEQ ID NO: 1363 - protein, 29 aa, Artificial Sequence
  Description of Artificial Sequence: Synthetic peptide
DDDKAFYRCLAYLLAGRPQASGGGGVRCR

SEQ ID NO: 1364 - protein, 29 aa, Artificial Sequence
  Description of Artificial Sequence: Synthetic peptide
DDDKAFYSCLAALRERSPQMSRGTWGGCR

SEQ ID NO: 1365 - protein, 29 aa, Artificial Sequence
  Description of Artificial Sequence: Synthetic peptide
DDDKTFYACLAALLGGTAELHDGSLECRG

SEQ ID NO: 1366 - protein, 29 aa, Artificial Sequence
  Description of Artificial Sequence: Synthetic peptide
DDDKTFYSCLGSLLTGTLPPARGARNICR

SEQ ID NO: 1367 - protein, 29 aa, Artificial Sequence
  Description of Artificial Sequence: Synthetic peptide
DDDKTFYSCLSSLLAGSPLPRRDLWAGCR

SEQ ID NO: 1368 - protein, 29 aa, Artificial Sequence
  Description of Artificial Sequence: Synthetic peptide
DDDKAFYSCMASLLAGTPEAQGSAWVRCR

SEQ ID NO: 1369 - protein, 29 aa, Artificial Sequence
  Description of Artificial Sequence: Synthetic peptide
DDDKNFYACMESLVSVAPPSSRDPFECRR

SEQ ID NO: 1370 - protein, 29 aa, Artificial Sequence
  Description of Artificial Sequence: Synthetic peptide
  MOD_RES (19): Unknown amino acid
DDDKSFYSCLASLVSGTAXPNRGPWERCR

SEQ ID NO: 1371 - protein, 29 aa, Artificial Sequence
  Description of Artificial Sequence: Synthetic peptide
DDDKIFYSCLASLLDDTAQSRRGQWARCR

SEQ ID NO: 1372 - protein, 29 aa, Artificial Sequence
  Description of Artificial Sequence: Synthetic peptide
DDDKIFYSCLGALLSGTPQTSHVTSGRCR

SEQ ID NO: 1373 - protein, 29 aa, Artificial Sequence
  Description of Artificial Sequence: Synthetic peptide
TDDKTFYFCLASLLAGTQQQSRGAWERCG

SEQ ID NO: 1374 - protein, 29 aa, Artificial Sequence
  Description of Artificial Sequence: Synthetic peptide
DDDKAFYSCLASVLTGSPHPGRSRWERCR

SEQ ID NO: 1375 - protein, 29 aa, Artificial Sequence
  Description of Artificial Sequence: Synthetic peptide
DDDKTFYSCLESMLTGTPPPCRGHGERGR

SEQ ID NO: 1376 - protein, 29 aa, Artificial Sequence
  Description of Artificial Sequence: Synthetic peptide
DDDKTFESCLEALVSGGSRRERGLWYRCR

SEQ ID NO: 1377 - protein, 29 aa, Artificial Sequence
  Description of Artificial Sequence: Synthetic peptide
DDDKAFYSCLSSLLAGTRERHRDTWPRCG

SEQ ID NO: 1378 - protein, 29 aa, Artificial Sequence
  Description of Artificial Sequence: Synthetic peptide
DDDKTFHSCLAALVTGTPQQKRGPWERCR

SEQ ID NO: 1379 - protein, 29 aa, Artificial Sequence
  Description of Artificial Sequence: Synthetic peptide
DDDKTFYLCLASLQTVTRLGDRVPWERCR

SEQ ID NO: 1380 - protein, 29 aa, Artificial Sequence
  Description of Artificial Sequence: Synthetic peptide
DDDKTFYSCLVSLLNGTAKPNRGQWEGCR

SEQ ID NO: 1381 - protein, 29 aa, Artificial Sequence
  Description of Artificial Sequence: Synthetic peptide
DDDKSFYSCLASLSNCTPGLLRCQWERCR

SEQ ID NO: 1382 - protein, 29 aa, Artificial Sequence
  Description of Artificial Sequence: Synthetic peptide
DDDKTFYSCLSSLLASTPQPNRGAWLCRR

SEQ ID NO: 1383 - protein, 29 aa, Artificial Sequence
  Description of Artificial Sequence: Synthetic peptide
DDDKSFYSCLASLSNCTPGLLRCQWERCR

SEQ ID NO: 1384 - protein, 29 aa, Artificial Sequence
  Description of Artificial Sequence: Synthetic peptide
DDDKTFYSCLGALLSGAPQTYRGPGAGCR

SEQ ID NO: 1385 - protein, 29 aa, Artificial Sequence
  Description of Artificial Sequence: Synthetic peptide
DDDKTFYSCLVSLLNGTAKPNRGQWEGCR

SEQ ID NO: 1386 - protein, 29 aa, Artificial Sequence
  Description of Artificial Sequence: Synthetic peptide
DDDKHFYSCLSSLLTAPPQSTRGPAGRHC

SEQ ID NO: 1387 - protein, 29 aa, Artificial Sequence
  Description of Artificial Sequence: Synthetic peptide
DDDKTFYSCLASLLNGNTQPNGGQWVRCR

SEQ ID NO: 1388 - protein, 29 aa, Artificial Sequence
  Description of Artificial Sequence: Synthetic peptide
DDDKVFYTCLASLSTGTPQRQSGEWQRCR

SEQ ID NO: 1389 - protein, 29 aa, Artificial Sequence
  Description of Artificial Sequence: Synthetic peptide
DDDKTFYSCLVSLLNGTAKPNRGQWEGCR

SEQ ID NO: 1390 - protein, 29 aa, Artificial Sequence
  Description of Artificial Sequence: Synthetic peptide
DDDKPFYSCLASLIQGTPLPERGMWERCR

SEQ ID NO: 1391 - protein, 28 aa, Artificial Sequence
  Description of Artificial Sequence: Synthetic peptide
DDDKTFYSCVSWLLTGARQRDGVWERCR

SEQ ID NO: 1392 - protein, 29 aa, Artificial Sequence
  Description of Artificial Sequence: Synthetic peptide
DDDKTFYSCLVSLLNGTAKPNRGQWEGCR

SEQ ID NO: 1393 - protein, 29 aa, Artificial Sequence
  Description of Artificial Sequence: Synthetic peptide
DDDKAFYGCLAALLTGARQPSRGVGERCF

SEQ ID NO: 1394 - protein, 29 aa, Artificial Sequence
  Description of Artificial Sequence: Synthetic peptide
DDDKTFYSCLVSLLNGTAKPNRGQWEGCR

SEQ ID NO: 1395 - protein, 29 aa, Artificial Sequence
  Description of Artificial Sequence: Synthetic peptide
DDDKTFYSCLASLLAGSPQPKRAGWEYCR

SEQ ID NO: 1396 - protein, 29 aa, Artificial Sequence
  Description of Artificial Sequence: Synthetic peptide
DDDKPFYSCLESLVTGRPQADRGVWERCR

SEQ ID NO: 1397 - protein, 29 aa, Artificial Sequence
  Description of Artificial Sequence: Synthetic peptide
DDDKTFYSCLTSLSRGSAHGLSGRWERCR

SEQ ID NO: 1398 - protein, 30 aa, Artificial Sequence
  Description of Artificial Sequence: Synthetic peptide
DDDDKTFYFCLATLLTGPPVPNREPWACYR

SEQ ID NO: 1399 - protein, 29 aa, Artificial Sequence
  Description of Artificial Sequence: Synthetic peptide
DDDKIFYSCLRTLGTNPPEPVRGPFDRCG

SEQ ID NO: 1400 - protein, 29 aa, Artificial Sequence
  Description of Artificial Sequence: Synthetic peptide
DDDKTFYSCLVSLLNGTAKPNRGQWEGCR

SEQ ID NO: 1401 - protein, 29 aa, Artificial Sequence
  Description of Artificial Sequence: Synthetic peptide
NDDKSFYSCVASLVNEGPSQVGVLGERCR

SEQ ID NO: 1402 - protein, 29 aa, Artificial Sequence
  Description of Artificial Sequence: Synthetic peptide
DDDKTFYSCLASMLTGPPHPDRVPWDRCR

SEQ ID NO: 1403 - protein, 29 aa, Artificial Sequence
  Description of Artificial Sequence: Synthetic peptide
DDDKKFYSCLVELVNGTSPPARGLWERCR

SEQ ID NO: 1404 - protein, 29 aa, Artificial Sequence
  Description of Artificial Sequence: Synthetic peptide
DDDKVFYSCLESLVSGTPEVNGRAWERCR

SEQ ID NO: 1405 - protein, 29 aa, Artificial Sequence
  Description of Artificial Sequence: Synthetic peptide
YDDKRFYYCLASLASGTLQTNREQWERCR

SEQ ID NO: 1406 - protein, 29 aa, Artificial Sequence
  Description of Artificial Sequence: Synthetic peptide
DDDKTFYSCLESLLNGTPQRNRGQWDPCS

SEQ ID NO: 1407 - protein, 29 aa, Artificial Sequence
  Description of Artificial Sequence: Synthetic peptide
DDDKTFYTCLQALITGYERPVGGRWESCR

SEQ ID NO: 1408 - protein, 29 aa, Artificial Sequence
  Description of Artificial Sequence: Synthetic peptide
DDDKAFYSCLATLLYGNPPSSRGQWHRCR

SEQ ID NO: 1409 - protein, 29 aa, Artificial Sequence
  Description of Artificial Sequence: Synthetic peptide
DDDKVFYSCLESLVSGTPEVNGRAWERCR

SEQ ID NO: 1410 - protein, 29 aa, Artificial Sequence
  Description of Artificial Sequence: Synthetic peptide
GDDKTFYACLSSLLYGTADWSQGQRDRCR

SEQ ID NO: 1411 - protein, 29 aa, Artificial Sequence
  Description of Artificial Sequence: Synthetic peptide
DDDKSFYSCMESLWTDTPQPNRGRWERCR

SEQ ID NO: 1412 - protein, 29 aa, Artificial Sequence
  Description of Artificial Sequence: Synthetic peptide
DDDKTFYSCLASLLTVSPEPSRGPWERCR

SEQ ID NO: 1413 - protein, 29 aa, Artificial Sequence
  Description of Artificial Sequence: Synthetic peptide
DDDKTFYSCMVQLLTGTPEKSCVTWERWR

SEQ ID NO: 1414 - protein, 29 aa, Artificial Sequence
  Description of Artificial Sequence: Synthetic peptide
DDDKTFYSCLVSLLNGTAKPNRGQWEGCR

SEQ ID NO: 1415 - protein, 29 aa, Artificial Sequence
  Description of Artificial Sequence: Synthetic peptide
DDDKTFYSCVASLVVGTAQPQCGPWQGWG

SEQ ID NO: 1416 - protein, 29 aa, Artificial Sequence
  Description of Artificial Sequence: Synthetic peptide
DDDKTFYSCLAGLVTGPPRQNWGAGDACR

SEQ ID NO: 1417 - protein, 29 aa, Artificial Sequence
  Description of Artificial Sequence: Synthetic peptide
DDDKTFYSCMSSLSTTAPQPKSGRWDRCR

SEQ ID NO: 1418 - protein, 29 aa, Artificial Sequence
  Description of Artificial Sequence: Synthetic peptide
DDDKTFYSCLASLVNGSLQPNRAPGELCR

SEQ ID NO: 1419 - protein, 29 aa, Artificial Sequence
  Description of Artificial Sequence: Synthetic peptide
DDDKTFYSCLVSLLNGTAKPNRGQWEGCR

SEQ ID NO: 1420 - protein, 29 aa, Artificial Sequence
  Description of Artificial Sequence: Synthetic peptide
DDDKTFYSCLVSLLNGTAKPNRGQWEGCR

SEQ ID NO: 1421 - protein, 29 aa, Artificial Sequence
  Description of Artificial Sequence: Synthetic peptide
DDDKSFYSCLESLLNGGPQQKRGPWEGCR

SEQ ID NO: 1422 - protein, 29 aa, Artificial Sequence
  Description of Artificial Sequence: Synthetic peptide
DDDKTFYSCLASLLNGNTQPNGGQWVRCR

SEQ ID NO: 1423 - protein, 29 aa, Artificial Sequence
  Description of Artificial Sequence: Synthetic peptide
DDDKSFYSCLASLSNCTPGLLRCQWERCR

SEQ ID NO: 1424 - protein, 29 aa, Artificial Sequence
  Description of Artificial Sequence: Synthetic peptide
DDDKNFYSCLSALLNGNTVSDRGQGERCF

SEQ ID NO: 1425 - protein, 27 aa, Artificial Sequence
  Description of Artificial Sequence: Synthetic peptide
DDTFYSCLASLVNGSPQAYGGPREHCR

SEQ ID NO: 1426 - protein, 29 aa, Artificial Sequence
  Description of Artificial Sequence: Synthetic peptide
DDDKIFYSCLAWLMTGPAPPYRGPWSCWS

SEQ ID NO: 1427 - protein, 29 aa, Artificial Sequence
  Description of Artificial Sequence: Synthetic peptide
DDDKIFYACLSSLSTGTWQPKRGPGERCR

SEQ ID NO: 1428 - protein, 29 aa, Artificial Sequence
  Description of Artificial Sequence: Synthetic peptide
DDDKSFYSCLASLSNCTPGLLRCQWERCR

SEQ ID NO: 1429 - protein, 29 aa, Artificial Sequence
  Description of Artificial Sequence: Synthetic peptide
DDDKTFYSCLGSLINGTPPPHRGLWQGCR

SEQ ID NO: 1430 - protein, 29 aa, Artificial Sequence
  Description of Artificial Sequence: Synthetic peptide
DDDKTFYSCLVSLLNGTAKPNRGQWEGCR

SEQ ID NO: 1431 - protein, 29 aa, Artificial Sequence
  Description of Artificial Sequence: Synthetic peptide
DDDKQFYSCLAFLASGIAQPQPGAWELCR

SEQ ID NO: 1432 - protein, 29 aa, Artificial Sequence
  Description of Artificial Sequence: Synthetic peptide
DDDKTFYCCLAALLTGAPPPKGGTCERCG

SEQ ID NO: 1433 - protein, 43 aa, Artificial Sequence
  Description of Artificial Sequence: Synthetic peptide
FHENFYDWFARKDSGGSGGSGGSDLCVLEELFWGDSLFDYCTG

SEQ ID NO: 1434 - protein, 43 aa, Artificial Sequence
  Description of Artificial Sequence: Synthetic peptide
  MOD_RES (6): Unknown amino acid
FHENFXDWFVRQVSGGSGGSGGSNLCVLEELFWGASLFGECSG

SEQ ID NO: 1435 - protein, 43 aa, Artificial Sequence
  Description of Artificial Sequence: Synthetic peptide
SHGNFSEWFVRQGYGGSGGSGGSDLCVLEELYWGASLFGYCSG

SEQ ID NO: 1436 - protein, 43 aa, Artificial Sequence
  Description of Artificial Sequence: Synthetic peptide
  MOD_RES (12): Unknown amino acid
FQESFYDWFVRXVTGGSGGSGGSDLCGVEDLVWGSALSGYCAG

SEQ ID NO: 1437 - protein, 43 aa, Artificial Sequence
  Description of Artificial Sequence: Synthetic peptide
FHENFNDWFVREVSGGSGGSGGSDLCVLEELFWGASLFSYCSG

SEQ ID NO: 1438 - protein, 43 aa, Artificial Sequence
  Description of Artificial Sequence: Synthetic peptide
  MOD_RES (12): Unknown amino acid
SHENFYDWFVRXGPGGSGGSGGSHLCVLEELFWGDSLFGACPG

SEQ ID NO: 1439 - protein, 43 aa, Artificial Sequence
  Description of Artificial Sequence: Synthetic peptide
  MOD_RES (40): Unknown amino acid
FHENFYDWFARQVSGGSGGSGGSHLCVLEELFWGASLFAXCSD

SEQ ID NO: 1440 - protein, 43 aa, Artificial Sequence
  Description of Artificial Sequence: Synthetic peptide
  MOD_RES (12): Unknown amino acid
FPDNFYDWFVRXVSGGSGGSGGSHLCVLEELFWGASPFGYCSG

SEQ ID NO: 1441 - protein, 43 aa, Artificial Sequence
  Description of Artificial Sequence: Synthetic peptide
FQENFYDWFGRQISGGSGGSGGSPLCDVEELFWGVSLFGYCTG

SEQ ID NO: 1442 - protein, 43 aa, Artificial Sequence
  Description of Artificial Sequence: Synthetic peptide
  MOD_RES (12): Unknown amino acid
FQENFYDWFVRXASGGSGGSGGSHLCALEEQFWGSSQFRYCSG

SEQ ID NO: 1443 - protein, 43 aa, Artificial Sequence
  Description of Artificial Sequence: Synthetic peptide
  MOD_RES (33): Unknown amino acid
FHENFYDWFARQVYGGSGGSGGSHLCVLEELFXGASLFATCSD

SEQ ID NO: 1444 - protein, 43 aa, Artificial Sequence
  Description of Artificial Sequence: Synthetic peptide
  MOD_RES (33): Unknown amino acid
FHENFYDRIVRQVAGGSGGSGGSALCVREELFXGDSLFGDCSG

SEQ ID NO: 1445 - protein, 43 aa, Artificial Sequence
  Description of Artificial Sequence: Synthetic peptide
  MOD_RES (38): Unknown amino acid
FHKNFYDWFDRQVSGGSGGSGSSRLCDLEELFWGASLXGHCSG

SEQ ID NO: 1446 - protein, 43 aa, Artificial Sequence
  Description of Artificial Sequence: Synthetic peptide
FHENFYDWFIRQDSGGSGGSGGSHLCAFEELLGGASPFGYCSG

SEQ ID NO: 1447 - protein, 43 aa, Artificial Sequence
  Description of Artificial Sequence: Synthetic peptide
  MOD_RES (12): Unknown amino acid
SNENFYDWFDRXVSGGSGGSGGSHLCLLEELSWGASLFGYCYG

SEQ ID NO: 1448 - protein, 43 aa, Artificial Sequence
  Description of Artificial Sequence: Synthetic peptide
  MOD_RES (31): Unknown amino acid
FHESFYDWFDRQVSGGSGGSGGSHLCVLEEXELGASVFGCCSG

SEQ ID NO: 1449 - protein, 36 aa, Artificial Sequence
  Description of Artificial Sequence: Synthetic peptide
  MOD_RES (12): Unknown amino acid
FHETFYDWFDRXVSGGSGGSGEELFGGASLFGYPSG

SEQ ID NO: 1450 - protein, 43 aa, Artificial Sequence
  Description of Artificial Sequence: Synthetic peptide
  MOD_RES (33): Unknown amino acid
SHENFYDWFGRQVSGGSGGSGGSNLCDLDEVSXGASLCGYRSG

SEQ ID NO: 1451 - protein, 44 aa, Artificial Sequence
  Description of Artificial Sequence: Synthetic peptide
  MOD_RES (3): Unknown amino acid
  MOD_RES (43): Unknown amino acid
FHXNFYDWFFCQVPEWIPMTLAVLTCAVLEEPIWGDSLFGYGXE

SEQ ID NO: 1452 - protein, 43 aa, Artificial Sequence
  Description of Artificial Sequence: Synthetic peptide
  MOD_RES (14): Unknown amino acid
SHENFYDWFVRQVXGGSGGSGGSHLCDLEELLGGASLMGSCSG

SEQ ID NO: 1453 - protein, 42 aa, Artificial Sequence
  Description of Artificial Sequence: Synthetic peptide
  MOD_RES (12): Unknown amino acid
  MOD_RES (38): Unknown amino acid
SHENFYDWFVRXVSGGAAAGAPPAMASHENFYDWFVRXVSGG

SEQ ID NO: 1454 - protein, 40 aa, Artificial Sequence
  Description of Artificial Sequence: Synthetic peptide
  MOD_RES (12): Unknown amino acid
FHENFYDWFIRXVGGGSGGSGGSDLCVLEDDCSRAAAGAP

SEQ ID NO: 1455 - protein, 25 aa, Artificial Sequence
  Description of Artificial Sequence: Synthetic peptide
  MOD_RES (22): Unknown amino acid
DYKDASVSGTFHDAFYEWFWRXVGS

SEQ ID NO: 1456 - protein, 43 aa, Artificial Sequence
  Description of Artificial Sequence: Synthetic peptide
  MOD_RES (24): Unknown amino acid
  MOD_RES (40): Unknown amino acid
FHENFYDLVPSAGSWWIRWLWRFXPVRLGRTVLGCFSDRXLFW

SEQ ID NO: 1457 - protein, 28 aa, Artificial Sequence
  Description of Artificial Sequence: Synthetic peptide
FHENFYDWFDRQVSGGSGGSVRAAAGAP

SEQ ID NO: 1458 - protein, 43 aa, Artificial Sequence
  Description of Artificial Sequence: Synthetic peptide
  MOD_RES (29): Unknown amino acid
VHENFYDWFDRQVSGGSGGSGGSQLCDLXEVIWGASLFGYCTG

SEQ ID NO: 1459 - protein, 43 aa, Artificial Sequence
  Description of Artificial Sequence: Synthetic peptide
  MOD_RES (12): Unknown amino acid
FHENFYDWFDRXVSGGSGGSGGSHLCVPEEQFWGASRFGYCSA

SEQ ID NO: 1460 - protein, 37 aa, Artificial Sequence
  Description of Artificial Sequence: Synthetic peptide
  MOD_RES (32): Unknown amino acid
FHDNFYDWFVRQVSGGSGGSGGSRQCQGASLXGYCSG

SEQ ID NO: 1461 - protein, 33 aa, Artificial Sequence
  Description of Artificial Sequence: Synthetic peptide
  MOD_RES (12): Unknown amino acid
FHEDFYDWFVRXVPGGSGGSGGSHLCVPGYCSS

SEQ ID NO: 1462 - protein, 36 aa, Artificial Sequence
  Description of Artificial Sequence: Synthetic peptide
  MOD_RES (12): Unknown amino acid
FRENFYDWFVCXVSGGSGGSGGSNLCVLEEAAAGAP

SEQ ID NO: 1463 - protein, 38 aa, Artificial Sequence
  Description of Artificial Sequence: Synthetic peptide
  MOD_RES (28): Unknown amino acid
GHDNFYDWFVRQVSGGSGGSGGSHLCVXGAFPWGYCSD

SEQ ID NO: 1464 - protein, 29 aa, Artificial Sequence
  Description of Artificial Sequence: Synthetic peptide
  MOD_RES (3): Unknown amino acid
FHXNFYDWFVRQVYGGSGGSGTGAAAGAP

SEQ ID NO: 1465 - protein, 43 aa, Artificial Sequence
  Description of Artificial Sequence: Synthetic peptide
  MOD_RES (33): Unknown amino acid
FHENFYDWFGRQVYGGSGGSGGSPVCILGELSXGGALFGDCSG

SEQ ID NO: 1466 - protein, 43 aa, Artificial Sequence
  Description of Artificial Sequence: Synthetic peptide
  MOD_RES (12): Unknown amino acid
FHENFYDWFVRXLSGGSGGSGGSHLCVPEERLWGDPLFGYCSG

SEQ ID NO: 1467 - protein, 27 aa, Artificial Sequence
  Description of Artificial Sequence: Synthetic peptide
  MOD_RES (3): Unknown amino acid
FHXNFYDWFVRQVSGGSGGSGGSHPAR

SEQ ID NO: 1468 - protein, 43 aa, Artificial Sequence
  Description of Artificial Sequence: Synthetic peptide
  MOD_RES (33): Unknown amino acid
FHENFYDWFVRQVTGGSGGSGGSHLCVLEELSXGAALPGYCSG

SEQ ID NO: 1469 - protein, 30 aa, Artificial Sequence
  Description of Artificial Sequence: Synthetic peptide
  MOD_RES (27): Unknown amino acid
VQGSFYDWFVRQVSGGSGGSGGSHLCXGSG

SEQ ID NO: 1470 - protein, 37 aa, Artificial Sequence
  Description of Artificial Sequence: Synthetic peptide
  MOD_RES (33): Unknown amino acid
FHENFYEWFVRQVSGGSGGSGGSHRCDVEELHXCASG

SEQ ID NO: 1471 - protein, 25 aa, Artificial Sequence
  Description of Artificial Sequence: Synthetic peptide
  MOD_RES (17): Unknown amino acid
DYKDGGYWGSFYEGLMXLVQSGTSG

SEQ ID NO: 1472 - protein, 43 aa, Artificial Sequence
  Description of Artificial Sequence: Synthetic peptide
  MOD_RES (40): Unknown amino acid
FHENFYDWFDRQVSGGSGGSGGSHRCVLEERFWGASLFGXCSG

SEQ ID NO: 1473 - protein, 43 aa, Artificial Sequence
  Description of Artificial Sequence: Synthetic peptide
  MOD_RES (33): Unknown amino acid
SHENFYDWFVHQVSGGSGGSGGSHLCVLEERFXGPSLFGYCSG

SEQ ID NO: 1474 - protein, 43 aa, Artificial Sequence
  Description of Artificial Sequence: Synthetic peptide
  MOD_RES (33): Unknown amino acid
FHANFYDWFFRQVSGGSGGSGGSDLCVLQDMFXGGSGAAAGAP

SEQ ID NO: 1475 - protein, 43 aa, Artificial Sequence
  Description of Artificial Sequence: Synthetic peptide
  MOD_RES (33): Unknown amino acid
FQDNFYDWFVRQISGGSGGSGGSHLCVLESWFXGASLFGYCSG

SEQ ID NO: 1476 - protein, 43 aa, Artificial Sequence
  Description of Artificial Sequence: Synthetic peptide
  MOD_RES (8): Unknown amino acid
FHETFYDXLGRLVFGGSGGSGGSHLCVPEELFWGTSLLSYCSG

SEQ ID NO: 1477 - protein, 29 aa, Artificial Sequence
  Description of Artificial Sequence: Synthetic peptide
  MOD_RES (26): Unknown amino acid
FHENFYDWFVRQVSGGSGGSGGSHLXGSG

SEQ ID NO: 1478 - protein, 43 aa, Artificial Sequence
  Description of Artificial Sequence: Synthetic peptide
  MOD_RES (33): Unknown amino acid
FHENFYDWFVRQVSGGSGGSGGSHRCGLEEPVXGASLVGYCAG

SEQ ID NO: 1479 - protein, 24 aa, Artificial Sequence
  Description of Artificial Sequence: Synthetic peptide
  MOD_RES (14): Unknown amino acid
FHANFYDWFVRQVXGGSGGSGGSG

SEQ ID NO: 1480 - protein, 43 aa, Artificial Sequence
  Description of Artificial Sequence: Synthetic peptide
  MOD_RES (33): Unknown amino acid
FHEDFYDWFVRQVGGGSGGSGGSHLCVREELFXGASLLGDCSG

SEQ ID NO: 1481 - protein, 31 aa, Artificial Sequence
  Description of Artificial Sequence: Synthetic peptide
  MOD_RES (1): Unknown amino acid
XHENFYDWFVRQLSGGSGGSDGSHLFGYGSG

SEQ ID NO: 1482 - protein, 43 aa, Artificial Sequence
  Description of Artificial Sequence: Synthetic peptide
FHENFYDWFDRQVGGGSGGSGGFSPVRTGRTVLGGFSVRLLLW

SEQ ID NO: 1483 - protein, 33 aa, Artificial Sequence
  Description of Artificial Sequence: Synthetic peptide
  MOD_RES (12): Unknown amino acid
SHDNFYDWFVRXVSGGSGGSGGSPLCVLGNCSG

SEQ ID NO: 1484 - protein, 43 aa, Artificial Sequence
  Description of Artificial Sequence: Synthetic peptide
  MOD_RES (12): Unknown amino acid
FYDNFYHWFDRXVSGGSGGSGGSHLCVLEERVCGASLFDYRSG

SEQ ID NO: 1485 - protein, 43 aa, Artificial Sequence
  Description of Artificial Sequence: Synthetic peptide
  MOD_RES (33): Unknown amino acid
FSEHFYDWFARQVSGGSGGSGGSHLCVLDERFXGASMVGYCSG

SEQ ID NO: 1486 - protein, 29 aa, Artificial Sequence
  Description of Artificial Sequence: Synthetic peptide
  MOD_RES (26): Unknown amino acid
FPENFYDWFDRQVSGGSGGGASLFGXGSG

SEQ ID NO: 1487 - protein, 43 aa, Artificial Sequence
  Description of Artificial Sequence: Synthetic peptide
FHENFYDWFDRQVSGGSSGSGGSHQCVQEERFWGASLCGYCSG

SEQ ID NO: 1488 - protein, 43 aa, Artificial Sequence
  Description of Artificial Sequence: Synthetic peptide
  MOD_RES (33): Unknown amino acid
FHDSFYDWFVRQVSGGSGGSGGSHLCGLEELFXGASRFGDCSG

SEQ ID NO: 1489 - protein, 35 aa, Artificial Sequence
  Description of Artificial Sequence: Synthetic peptide
  MOD_RES (12): Unknown amino acid
FHGDFYDWFVRXVSGGSGGSGGSHLCVLEELYCSG

SEQ ID NO: 1490 - protein, 43 aa, Artificial Sequence
  Description of Artificial Sequence: Synthetic peptide
  MOD_RES (12): Unknown amino acid
FHDNFYDWFVRXVSGGSGGSGGSHLCVVEERFWGGSPIGYCSG

SEQ ID NO: 1491 - protein, 33 aa, Artificial Sequence
  Description of Artificial Sequence: Synthetic peptide
FQDNFYDWFVRQVSGGSGGSGGSHRCVLEGCSG

SEQ ID NO: 1492 - protein, 26 aa, Artificial Sequence
  Description of Artificial Sequence: Synthetic peptide
FHENFYDWFDRQVSGGSACLFGYCSG

SEQ ID NO: 1493 - protein, 18 aa, Artificial Sequence
  Description of Artificial Sequence: Synthetic peptide
  MOD_RES (12): Unknown amino acid
YHENFYDWFVRXVSGGSG

SEQ ID NO: 1494 - protein, 32 aa, Artificial Sequence
  Description of Artificial Sequence: Synthetic peptide
  MOD_RES (12): Unknown amino acid
VHESFYDWFVRXVAGGSGGSGGSHLCDVDCSG

SEQ ID NO: 1495 - protein, 29 aa, Artificial Sequence
  Description of Artificial Sequence: Synthetic peptide
  MOD_RES (26): Unknown amino acid
FHDNFYDWFDRQVSGGSGGSGSPFGXRSD

SEQ ID NO: 1496 - protein, 43 aa, Artificial Sequence
  Description of Artificial Sequence: Synthetic peptide
  MOD_RES (3): Unknown amino acid
FHXHFYDWFDRQVSGGSGGSGGSLLCVGEEPFWGASLFAYCSG

SEQ ID NO: 1497 - protein, 22 aa, Artificial Sequence
  Description of Artificial Sequence: Synthetic peptide
FHENFYDWFVRQVSGGSGGSGG

SEQ ID NO: 1498 - protein, 43 aa, Artificial Sequence
  Description of Artificial Sequence: Synthetic peptide
  MOD_RES (12): Unknown amino acid
FHESFYDWFVRXVPGGSGGSGGSQLCVQEELFEGDSLLGDCSG

SEQ ID NO: 1499 - protein, 36 aa, Artificial Sequence
  Description of Artificial Sequence: Synthetic peptide
  MOD_RES (26): Unknown amino acid
FHENFYEWFDRQVSGGSGGVLDERFXGACPSGYCSG

SEQ ID NO: 1500 - protein, 43 aa, Artificial Sequence
  Description of Artificial Sequence: Synthetic peptide
  MOD_RES (12): Unknown amino acid
FHDNFYDWFVRXVAGGSGGSGGSHLCVPEELFWGASLFGYCSG

SEQ ID NO: 1501 - protein, 43 aa, Artificial Sequence
  Description of Artificial Sequence: Synthetic peptide
  MOD_RES (12): Unknown amino acid
FGEDFYDWFVRXVSGGSGGSGGSHLCVLDELFWDASPFGFCPG

SEQ ID NO: 1502 - protein, 42 aa, Artificial Sequence
  Description of Artificial Sequence: Synthetic peptide
  MOD_RES (1): Unknown amino acid
XHDNFYGWFDRQVSGGSGGSGGSHLCVLDELLWGASLFGYCS

SEQ ID NO: 1503 - protein, 30 aa, Artificial Sequence
  Description of Artificial Sequence: Synthetic peptide
  MOD_RES (12): Unknown amino acid
FQENFYDWFVRXVSGDELSGGASQCGSCSG

SEQ ID NO: 1504 - protein, 43 aa, Artificial Sequence
  Description of Artificial Sequence: Synthetic peptide
  MOD_RES (40): Unknown amino acid
SHESFYDWFVRQVSGGSGGSGGSDLCVWEELCGGAPLVGXGSS

SEQ ID NO: 1505 - protein, 25 aa, Artificial Sequence
  Description of Artificial Sequence: Synthetic peptide
FPENFYDWFDRQVSGGSGGSGGSSG

SEQ ID NO: 1506 - protein, 43 aa, Artificial Sequence
  Description of Artificial Sequence: Synthetic peptide
FRENFYDWFERQVSGGSGGSGGSHLCVLEELSWGASTFGSCSG

SEQ ID NO: 1507 - protein, 43 aa, Artificial Sequence
  Description of Artificial Sequence: Synthetic peptide
  MOD_RES (12): Unknown amino acid
IHVDFYDWFARXVSGGSGGSGGSSLCVLDELFWDASLFGDCAG

SEQ ID NO: 1508 - protein, 43 aa, Artificial Sequence
  Description of Artificial Sequence: Synthetic peptide
FHASFYDWFDRQVSGGSGGSGGSHLCDLEGLFWGAAPFGYCSG

SEQ ID NO: 1509 - protein, 43 aa, Artificial Sequence
  Description of Artificial Sequence: Synthetic peptide
  MOD_RES (12): Unknown amino acid
SDANFYDWFLRXVSGGSGGSGGSHLCALEEQFWDASLFGDCSG

SEQ ID NO: 1510 - protein, 43 aa, Artificial Sequence
  Description of Artificial Sequence: Synthetic peptide
  MOD_RES (12): Unknown amino acid
FHDKFYDWFVSXVAGGSGGSGGSHLCVLEDRFWGSSLSGYCSG

SEQ ID NO: 1511 - protein, 43 aa, Artificial Sequence
  Description of Artificial Sequence: Synthetic peptide
  MOD_RES (42): Unknown amino acid
FHDNFYDWFVRQVTDGSGGSGGSQLCVVEDLFWDASRFGYCXG

SEQ ID NO: 1512 - protein, 43 aa, Artificial Sequence
  Description of Artificial Sequence: Synthetic peptide
  MOD_RES (12): Unknown amino acid
VSEDFYEWFVRXASGGSGGSGGSNLCVLEELFWGSSLIGDCSG

SEQ ID NO: 1513 - protein, 43 aa, Artificial Sequence
  Description of Artificial Sequence: Synthetic peptide
  MOD_RES (32): Unknown amino acid
FPENFYDWFVRQVSGGSGGSGGSHLCVLEELXWGASMFGYCSG

SEQ ID NO: 1514 - protein, 43 aa, Artificial Sequence
  Description of Artificial Sequence: Synthetic peptide
  MOD_RES (40): Unknown amino acid
FQENFYDWFVRQVSGGSGGSGGSHLCVLEALFWGASLFGXCSG

SEQ ID NO: 1515 - protein, 25 aa, Artificial Sequence
  Description of Artificial Sequence: Synthetic peptide
  MOD_RES (12): Unknown amino acid
  MOD_RES (24): Unknown amino acid
DYKDGRGGRRFXGRSSVVLWKRLXR

SEQ ID NO: 1516 - protein, 26 aa, Artificial Sequence
  Description of Artificial Sequence: Synthetic peptide
  MOD_RES (19): Unknown amino acid
DTKTFIGITGVLPRLSAVXGFWGGSW

SEQ ID NO: 1517 - protein, 43 aa, Artificial Sequence
  Description of Artificial Sequence: Synthetic peptide
  MOD_RES (29): Unknown amino acid
CHENFYVWFVSQVAGGSGGSGGSRLCIMXELFRGASLFGYSSG

SEQ ID NO: 1518 - protein, 43 aa, Artificial Sequence
  Description of Artificial Sequence: Synthetic peptide
  MOD_RES (12): Unknown amino acid
FHANFYDWFVRXVSGGSGGSGGSHLCVLEELVSGPSLLGYCSG

SEQ ID NO: 1519 - protein, 43 aa, Artificial Sequence
  Description of Artificial Sequence: Synthetic peptide
  MOD_RES (12): Unknown amino acid
FHEKFYDWFDLXLSGGSGGSGGSHLCVREEPFWGASLFGYCPG

SEQ ID NO: 1520 - protein, 20 aa, Artificial Sequence
  Description of Artificial Sequence: Synthetic peptide
HLCVLEELFWGASLFGYCSG

SEQ ID NO: 1521 - protein, 20 aa, Artificial Sequence
  Description of Artificial Sequence: Synthetic peptide
WLDQEWAWVQCEVYGRGCPS

SEQ ID NO: 1522 - protein, 33 aa, Artificial Sequence; identical to SEQ ID NO: 1483
  Description of Artificial Sequence: Synthetic peptide
  MOD_RES (12): Unknown amino acid

SEQ ID NO: 1523 - protein, 43 aa, Artificial Sequence; identical to SEQ ID NO: 1484
  Description of Artificial Sequence: Synthetic peptide
  MOD_RES (12): Unknown amino acid

SEQ ID NO: 1524 - protein, 43 aa, Artificial Sequence; identical to SEQ ID NO: 1487
  Description of Artificial Sequence: Synthetic peptide

SEQ ID NO: 1525 - protein, 35 aa, Artificial Sequence; identical to SEQ ID NO: 1489
  Description of Artificial Sequence: Synthetic peptide
  MOD_RES (12): Unknown amino acid

SEQ ID NO: 1526 - protein, 33 aa, Artificial Sequence; identical to SEQ ID NO: 1491
  Description of Artificial Sequence: Synthetic peptide

SEQ ID NO: 1527 - protein, 26 aa, Artificial Sequence
  Description of Artificial Sequence: Synthetic peptide
FHENFYDWFDRQVSGGSACLFGYCSG

SEQ ID NO: 1528 - protein, 32 aa, Artificial Sequence; identical to SEQ ID NO: 1494
  Description of Artificial Sequence: Synthetic peptide
  MOD_RES (12): Unknown amino acid

SEQ ID NO: 1529 - protein, 36 aa, Artificial Sequence; identical to SEQ ID NO: 1499
  Description of Artificial Sequence: Synthetic peptide
  MOD_RES (26): Unknown amino acid

SEQ ID NO: 1530 - protein, 30 aa, Artificial Sequence; identical to SEQ ID NO: 1503
  Description of Artificial Sequence: Synthetic peptide
  MOD_RES (12): Unknown amino acid

SEQ ID NO: 1531 - protein, 43 aa, Artificial Sequence; identical to SEQ ID NO: 1504
  Description of Artificial Sequence: Synthetic peptide
  MOD_RES (40): Unknown amino acid

SEQ ID NO: 1532 - protein, 24 aa, Artificial Sequence
  Description of Artificial Sequence: Synthetic peptide
  MOD_RES (14): Unknown amino acid
FHANFYDWFVRQVXGGSGGSGGSG

SEQ ID NO: 1533 - protein, 18 aa, Artificial Sequence
  Description of Artificial Sequence: Synthetic peptide
  MOD_RES (12): Unknown amino acid
YHENFYDWFVRXVSGGSG

SEQ ID NO: 1534 - protein, 22 aa, Artificial Sequence
  Description of Artificial Sequence: Synthetic peptide
FHENFYDWFVRQVSGGSGGSGG

SEQ ID NO: 1535 - protein, 25 aa, Artificial Sequence
  Description of Artificial Sequence: Synthetic peptide
FPENFYDWFDRQVSGGSGGSGGSSG

SEQ ID NO: 1536 - protein, 29 aa, Artificial Sequence
  Description of Artificial Sequence: Synthetic peptide
  MOD_RES (26): Unknown amino acid
FHENFYDWFVRQVSGGSGGSGGSHLXGSG

SEQ ID NO: 1537 - protein, 31 aa, Artificial Sequence; identical to SEQ ID NO: 1481
  Description of Artificial Sequence: Synthetic peptide
  MOD_RES (1): Unknown amino acid

SEQ ID NO: 1538 - protein, 43 aa, Artificial Sequence; identical to SEQ ID NO: 1482
  Description of Artificial Sequence: Synthetic peptide

SEQ ID NO: 1539 - protein, 29 aa, Artificial Sequence
  Description of Artificial Sequence: Synthetic peptide
  MOD_RES (26): Unknown amino acid
FPENFYDWFDRQVSGGSGGGASLFGXGSG

SEQ ID NO: 1540 - protein, 29 aa, Artificial Sequence
  Description of Artificial Sequence: Synthetic peptide
  MOD_RES (26): Unknown amino acid
FHDNFYDWFDRQVSGGSGGSGSPFGXRSD

SEQ ID NO: 1541 - protein, 23 aa, Artificial Sequence
  Description of Artificial Sequence: Synthetic peptide
DYKDLCQSWGVRIGWLAGLCPKK

SEQ ID NO: 1542 - protein, 17 aa, Artificial Sequence
  Description of Artificial Sequence: Synthetic peptide
LCQSWGVRIGWLAGLCP

SEQ ID NO: 1543 - protein, 8 aa, Artificial Sequence
  Description of Artificial Sequence: Synthetic peptide
  MOD_RES (2): Pro, Gly, Ser, Arg, Ala or Leu; preferably Pro
  MOD_RES (5): Any amino acid; preferably a charged or aromatic amino acid
  MOD_RES (7): Hydrophobic amino acid; preferably Leu or Phe
  MOD_RES (8): Any amino acid; preferably a small amino acid
WXGYXWXX

SEQ ID NO: 1544 - protein, 5 aa, Artificial Sequence
  Description of Artificial Sequence: Synthetic peptide
  MOD_RES (3): Any amino acid
FYXWF

SEQ ID NO: 1545 - protein, 4 aa, Artificial Sequence
  Description of Artificial Sequence: Synthetic peptide
DYKD

SEQ ID NO: 1546 - protein, 6 aa, Artificial Sequence
  Description of Artificial Sequence: Synthetic peptide
AAAGAP

SEQ ID NO: 1547 - protein, 8 aa, Artificial Sequence
  Description of Artificial Sequence: Synthetic peptide
DYKDDDDK

SEQ ID NO: 1548 - protein, 20 aa, Artificial Sequence
  Description of Artificial Sequence: Synthetic peptide
  MOD_RES (14): Tyr or Trp
SLEEEWAQIQCEIXGRGCRY

SEQ ID NO: 1549 - protein, 7 aa, Artificial Sequence
  Description of Artificial Sequence: Synthetic peptide
  MOD_RES (2): Ala or Glu
  MOD_RES (7): Phe or Leu
WXGYEWX

SEQ ID NO: 1550 - protein, 21 aa, Artificial Sequence
  Description of Artificial Sequence: Synthetic peptide
CWARPCGDAANFYDWFVQQAS

SEQ ID NO: 1551 - protein, 12 aa, Artificial Sequence
  Description of Artificial Sequence: Synthetic peptide
SAKNFYDWFVKK

SEQ ID NO: 1552 - protein, 19 aa, Artificial Sequence
  Description of Artificial Sequence: Synthetic peptide
PPWGARFYDAIEQLVFDNL

SEQ ID NO: 1553 - protein, 18 aa, Artificial Sequence
  Description of Artificial Sequence: Synthetic peptide
VMDARDDPFYHKLSELVT

SEQ ID NO: 1554 - protein, 5 aa, Artificial Sequence
  Description of Artificial Sequence: Synthetic peptide
FYDWF

SEQ ID NO: 1555 - protein, 5 aa, Artificial Sequence
  Description of Artificial Sequence: Synthetic peptide
FYEWF

SEQ ID NO: 1556 - protein, 16 aa, Artificial Sequence
  Description of Artificial Sequence: Synthetic peptide
FHENFYDWFVRQVSKK

SEQ ID NO: 1557 - protein, 14 aa, Artificial Sequence
  Description of Artificial Sequence: Synthetic peptide
FHENFYDWFVRQVS

SEQ ID NO: 1558 - protein, 18 aa, Artificial Sequence
  Description of Artificial Sequence: Synthetic peptide
GSLDESFYDWFERQLGKK

SEQ ID NO: 1559 - protein, 16 aa, Artificial Sequence
  Description of Artificial Sequence: Synthetic peptide
GSLDESFYDWFERQLG

SEQ ID NO: 1560 - protein, 21 aa, Artificial Sequence
  Description of Artificial Sequence: Synthetic peptide
GRVDWLQRNANFYDWFVAELG

SEQ ID NO: 1561 - protein, 16 aa, Artificial Sequence
  Description of Artificial Sequence: Synthetic peptide
GLADEDFYEWFERQLR

SEQ ID NO: 1562 - protein, 16 aa, Artificial Sequence
  Description of Artificial Sequence: Synthetic peptide
GLADELFYEWFDRQLS

SEQ ID NO: 1563 - protein, 16 aa, Artificial Sequence
  Description of Artificial Sequence: Synthetic peptide
GQLDEDFYEWFDRQLS

SEQ ID NO: 1564 - protein, 16 aa, Artificial Sequence
  Description of Artificial Sequence: Synthetic peptide
GQLDEDFYAWFDRQLS

SEQ ID NO: 1565 - protein, 16 aa, Artificial Sequence
  Description of Artificial Sequence: Synthetic peptide
GFMDESFYEWFERQLR

SEQ ID NO: 1566 - protein, 16 aa, Artificial Sequence
  Description of Artificial Sequence: Synthetic peptide
GFWDESFYAWFERQLR

SEQ ID NO: 1567 - protein, 16 aa, Artificial Sequence
  Description of Artificial Sequence: Synthetic peptide
GFMDESFYAWFERQLR

SEQ ID NO: 1568 - protein, 16 aa, Artificial Sequence
  Description of Artificial Sequence: Synthetic peptide
GFWDESFYEWFERQLR

SEQ ID NO: 1569 - protein, 8 aa, Artificial Sequence
  Description of Artificial Sequence: Synthetic peptide
  MOD_RES (3)..(4): Any amino acid
  MOD_RES (6)..(7): Any amino acid
FYXXLXXL

SEQ ID NO: 1570 - protein, 8 aa, Artificial Sequence
  Description of Artificial Sequence: Synthetic peptide
  MOD_RES (3)..(4): Any amino acid
  MOD_RES (6)..(7): Any amino acid
FYXXIXXL

SEQ ID NO: 1571 - protein, 8 aa, Artificial Sequence
  Description of Artificial Sequence: Synthetic peptide
  MOD_RES (3): Any amino acid
  MOD_RES (6)..(7): Any amino acid
FYXAIXXL

SEQ ID NO: 1572 - protein, 8 aa, Artificial Sequence
  Description of Artificial Sequence: Synthetic peptide
  MOD_RES (3): Any amino acid
  MOD_RES (6)..(7): Any amino acid
FYXYFXXL

SEQ ID NO: 1573 - protein, 8 aa, Artificial Sequence
  Description of Artificial Sequence: Synthetic peptide
  MOD_RES (3): Any amino acid
  MOD_RES (6)..(7): Any amino acid
FYXYFXXL

SEQ ID NO: 1574 - protein, 16 aa, Artificial Sequence
  Description of Artificial Sequence: Synthetic peptide
  MOD_RES (1)..(4): Any amino acid which allows for binding to IR or IGF-1R
  MOD_RES (7): Any amino acid
  MOD_RES (10)..(11): Any amino acid
  MOD_RES (13)..(16): Any amino acid which allows for binding to IR or IGF-1R
XXXXFYXYFXXLXXXX

SEQ ID NO: 1575 - protein, 20 aa, Artificial Sequence
  Description of Artificial Sequence: Synthetic peptide
  MOD_RES (1): Any amino acid
  MOD_RES (4)..(5): Any amino acid
  MOD_RES (7)..(9): Any amino acid
  MOD_RES (12)..(17): Any amino acid
  MOD_RES (19)..(20): Any amino acid
XLCXXEXXXWGXXXXXXCXX

SEQ ID NO: 1576 - protein, 20 aa, Artificial Sequence
  Description of Artificial Sequence: Synthetic peptide
HLCVLEELFWGASLFGYCSG

SEQ ID NO: 1577 - protein, 20 aa, Artificial Sequence
  Description of Artificial Sequence: Synthetic peptide
  MOD_RES (1)..(4): Any amino acid
  MOD_RES (8): Any hydrophobic amino acid
  MOD_RES (12): Any amino acid
  MOD_RES (13): Any hydrophobic amino acid
  MOD_RES (14)..(15): Any amino acid
  MOD_RES (17): Any amino acid
  MOD_RES (19)..(20): Any amino acid
XXXXLCEXFGGXXXXGXCXX

SEQ ID NO: 1578 - protein, 20 aa, Artificial Sequence
  Description of Artificial Sequence: Synthetic peptide
  MOD_RES (1): Any amino acid
  MOD_RES (3): Any polar amino acid; preferably Asp or Glu
  MOD_RES (4): Any amino acid
  MOD_RES (5): Any amino acid; strong preference for Glu
  MOD_RES (7)..(8): Any amino acid
  MOD_RES (9): Any amino acid; preferaby Val, Ile, Leu or Met
  MOD_RES (10): Any amino acid
  MOD_RES (12): Any amino acid
  MOD_RES (13): Any amino acid; preferably Val, Ile, Leu or Met
  MOD_RES (14): Any aromatic amino acid
  MOD_RES (15)..(17): Any amino acid
  MOD_RES (19)..(20): Any amino acid
XLXXXWXXXXCXXXXXXCXX

SEQ ID NO: 1579 - protein, 23 aa, Artificial Sequence
  Description of Artificial Sequence: Synthetic peptide
KWLDQEWAWVQCEVYGRGCPSKK

SEQ ID NO: 1580 - protein, 21 aa, Artificial Sequence
  Description of Artificial Sequence: Synthetic peptide
KWLDQEWAWVQCEVYGRGCPS

SEQ ID NO: 1581 - protein, 20 aa, Artificial Sequence
  Description of Artificial Sequence: Synthetic peptide
SLEEEWAQIQCEIYGRGCRY

SEQ ID NO: 1582 - protein, 20 aa, Artificial Sequence
  Description of Artificial Sequence: Synthetic peptide
SLEEEWAQIQCEIWGRGCRY

SEQ ID NO: 1583 - protein, 20 aa, Artificial Sequence
  Description of Artificial Sequence: Synthetic peptide
SLEEEWAQIECEVYGRGCPS

SEQ ID NO: 1584 - protein, 20 aa, Artificial Sequence
  Description of Artificial Sequence: Synthetic peptide
SLEEEWAQIECEVWGRGCPS

SEQ ID NO: 1585 - protein, 12 aa, Artificial Sequence
  Description of Artificial Sequence: Synthetic peptide
  MOD_RES (6): Any amino acid; preferably a polar amino acid
  MOD_RES (8)..(10): Any amino acid
HPPLSXLXXXLL

SEQ ID NO: 1586 - protein, 5 aa, Artificial Sequence
  Description of Artificial Sequence: Synthetic peptide
WPTYW

SEQ ID NO: 1587 - protein, 11 aa, Artificial Sequence
  Description of Artificial Sequence: Synthetic peptide
ACVWPTYWNCG

SEQ ID NO: 1588 - protein, 4 aa, Artificial Sequence
  Description of Artificial Sequence: Synthetic peptide
WPGY

SEQ ID NO: 1589 - protein, 23 aa, Artificial Sequence
  Description of Artificial Sequence: Synthetic peptide
KVRGFQGGTVWPGYEWLRNAAKK

SEQ ID NO: 1590 - protein, 21 aa, Artificial Sequence
  Description of Artificial Sequence: Synthetic peptide
KVRGFQGGTVWPGYEWLRNAA

SEQ ID NO: 1591 - protein, 7 aa, Artificial Sequence
  Description of Artificial Sequence: Synthetic peptide
WAGYEWF

SEQ ID NO: 1592 - protein, 7 aa, Artificial Sequence
  Description of Artificial Sequence: Synthetic peptide
WEGYEWL

SEQ ID NO: 1593 - protein, 7 aa, Artificial Sequence
  Description of Artificial Sequence: Synthetic peptide
WAGYEWL

SEQ ID NO: 1594 - protein, 7 aa, Artificial Sequence
  Description of Artificial Sequence: Synthetic peptide
WEGYEWF

SEQ ID NO: 1595 - protein, 15 aa, Artificial Sequence
  Description of Artificial Sequence: Synthetic peptide
DSDWAGYEWFEEQLD

SEQ ID NO: 1596 - protein, 5 aa, Artificial Sequence
  Description of Artificial Sequence: Synthetic peptide
  MOD_RES (3): Any amino acid
FYXWF

SEQ ID NO: 1597 - protein, 4 aa, Artificial Sequence
  Description of Artificial Sequence: Synthetic peptide
VYGR

SEQ ID NO: 1598 - protein, 4 aa, Artificial Sequence
  Description of Artificial Sequence: Synthetic peptide
EQLD

SEQ ID NO: 1599 - protein, 39 aa, Artificial Sequence; identical to SEQ ID NO: 214
  Description of Artificial Sequence: Synthetic peptide

SEQ ID NO: 1600 - protein, 26 aa, Artificial Sequence
  Description of Artificial Sequence: Synthetic peptide
GIISQSCPESFYDWFAGQVSDPWWCW

SEQ ID NO: 1601 - protein, 26 aa, Artificial Sequence
  Description of Artificial Sequence: Synthetic peptide
VGRASGFPENFYDWFGRQLSLQSGEQ

SEQ ID NO: 1602 - protein, 38 aa, Artificial Sequence
  Description of Artificial Sequence: Synthetic peptide
YRGMLVLGRISDGAGVASEPPARIGRKVFAVNFYDWFV

SEQ ID NO: 1603 - protein, 39 aa, Artificial Sequence; identical to SEQ ID NO: 216
  Description of Artificial Sequence: Synthetic peptide

SEQ ID NO: 1604 - protein, 26 aa, Artificial Sequence
  Description of Artificial Sequence: Synthetic peptide
VGYQGQGDENFYDWFIRQVSGRLGVQ

SEQ ID NO: 1605 - protein, 26 aa, Artificial Sequence
  Description of Artificial Sequence: Synthetic peptide
SACQFDCHENFYDWFARQVSGGAAYG

SEQ ID NO: 1606 - protein, 26 aa, Artificial Sequence
  Description of Artificial Sequence: Synthetic peptide
SAAQLFFQESFYDWFLRQVAESSQPN

SEQ ID NO: 1607 - protein, 26 aa, Artificial Sequence
  Description of Artificial Sequence: Synthetic peptide
AVRATRFDEAFYDWFVRQISDGQGNK

SEQ ID NO: 1608 - protein, 26 aa, Artificial Sequence
  Description of Artificial Sequence: Synthetic peptide
VNQSGSIHENFYDWFERQVSHQRGVR

SEQ ID NO: 1609 - protein, 26 aa, Artificial Sequence
  Description of Artificial Sequence: Synthetic peptide
APDPSDFQEIFYDWFVRQVSRMPGGG

SEQ ID NO: 1610 - protein, 25 aa, Artificial Sequence
  Description of Artificial Sequence: Synthetic peptide
SSCDGAGHESFYEWFVRQVSGCRSV

SEQ ID NO: 1611 - protein, 26 aa, Artificial Sequence
  Description of Artificial Sequence: Synthetic peptide
RAGSSDFHEDFYEWFVRQVSLSLKGK

SEQ ID NO: 1612 - protein, 26 aa, Artificial Sequence
  Description of Artificial Sequence: Synthetic peptide
QAVQPGFHEEFYDWFVRQVSTGVGGG

SEQ ID NO: 1613 - protein, 16 aa, Artificial Sequence
  Description of Artificial Sequence: Synthetic peptide
GFREGNFYEWFQAQVT

SEQ ID NO: 1614 - protein, 26 aa, Artificial Sequence
  Description of Artificial Sequence: Synthetic peptide
SSIGGGFHENFYDWFSRQLSQSPPLK

SEQ ID NO: 1615 - protein, 26 aa, Artificial Sequence
  Description of Artificial Sequence: Synthetic peptide
QSPVGSSHEDFYDWFFRQVAQSGAHQ

SEQ ID NO: 1616 - protein, 26 aa, Artificial Sequence
  Description of Artificial Sequence: Synthetic peptide
NYRRQVFNGNFYDWFDRQVFSLVTPG

SEQ ID NO: 1617 - protein, 26 aa, Artificial Sequence
  Description of Artificial Sequence: Synthetic peptide
TLDGGSFEEQFYDWFVRQLSYRTNPD

SEQ ID NO: 1618 - protein, 26 aa, Artificial Sequence
  Description of Artificial Sequence: Synthetic peptide
FYVQQWGHENFYDWFDRQVSQSGGAG

SEQ ID NO: 1619 - protein, 26 aa, Artificial Sequence
  Description of Artificial Sequence: Synthetic peptide
LRRQAPVEENFYDWFVRQVSGDRVGG

SEQ ID NO: 1620 - protein, 26 aa, Artificial Sequence
  Description of Artificial Sequence: Synthetic peptide
RCGRELYHSTFYDWFDRQVAGRTCPS

SEQ ID NO: 1621 - protein, 26 aa, Artificial Sequence
  Description of Artificial Sequence: Synthetic peptide
CCLLCRFQQNFYDWFVCQGISRLRPL

SEQ ID NO: 1622 - protein, 26 aa, Artificial Sequence
  Description of Artificial Sequence: Synthetic peptide
PPLASDLDVQFYGWFVQQVSPPGRGG

SEQ ID NO: 1623 - protein, 25 aa, Artificial Sequence
  Description of Artificial Sequence: Synthetic peptide
GAPVDQLHEDFYDWFVRQVSQAATG

SEQ ID NO: 1624 - protein, 16 aa, Artificial Sequence
  Description of Artificial Sequence: Synthetic peptide
GFREGSFYDWFQAQVT

SEQ ID NO: 1625 - protein, 21 aa, Artificial Sequence
  Description of Artificial Sequence: Synthetic peptide
SQAGSAFYAWFDQVLRTVHSA

SEQ ID NO: 1626 - protein, 26 aa, Artificial Sequence
  Description of Artificial Sequence: Synthetic peptide
RGAVAGFHDQFYDWFDRQVSRVHKFG

SEQ ID NO: 1627 - protein, 26 aa, Artificial Sequence
  Description of Artificial Sequence: Synthetic peptide
AICDAGFHEHFYDWFALQVSDCGRQS

SEQ ID NO: 1628 - protein, 26 aa, Artificial Sequence
  Description of Artificial Sequence: Synthetic peptide
LGYQEPFQQNFYDWFVRQVSGAENAG

SEQ ID NO: 1629 - protein, 21 aa, Artificial Sequence
  Description of Artificial Sequence: Synthetic peptide
EAASLGSQDRNFYDWFVRQVV

SEQ ID NO: 1630 - protein, 21 aa, Artificial Sequence
  Description of Artificial Sequence: Synthetic peptide
VERSASSQDGNFYDWFVVQIR

SEQ ID NO: 1631 - protein, 21 aa, Artificial Sequence
  Description of Artificial Sequence: Synthetic peptide
TSEVQRRSQDNFYDWFVAQVA

SEQ ID NO: 1632 - protein, 26 aa, Artificial Sequence
  Description of Artificial Sequence: Synthetic peptide
HLADGQFHEKFYDWFERQISSRCNDC

SEQ ID NO: 1633 - protein, 26 aa, Artificial Sequence
  Description of Artificial Sequence: Synthetic peptide
FRTLAAQHDSFYDWFDRQVSGAAGER

SEQ ID NO: 1634 - protein, 20 aa, Artificial Sequence
  Description of Artificial Sequence: Synthetic peptide
SFHEDFYDWFDRQVSGSLKK

SEQ ID NO: 1635 - protein, 25 aa, Artificial Sequence
  Description of Artificial Sequence: Synthetic peptide
TFYSCLASLLTGTPQPNRGPWERCR

SEQ ID NO: 1636 - protein, 25 aa, Artificial Sequence
  Description of Artificial Sequence: Synthetic peptide
FFYDCLAALLQGVARYHDLCAVEIT

SEQ ID NO: 1637 - protein, 27 aa, Artificial Sequence
  Description of Artificial Sequence: Synthetic peptide
CCTTEMVVMDARDDPFYHKLSELVTGG

SEQ ID NO: 1638 - protein, 20 aa, Artificial Sequence
  Description of Artificial Sequence: Synthetic peptide
RGQSDAFYSGLWALIGLSDG

SEQ ID NO: 1639 - protein, 21 aa, Artificial Sequence
  Description of Artificial Sequence: Synthetic peptide
GVRAMSFYDALVSVLGLGPSG

SEQ ID NO: 1640 - protein, 20 aa, Artificial Sequence
  Description of Artificial Sequence: Synthetic peptide
RLFYCGIQALGANLGYSGCV

SEQ ID NO: 1641 - protein, 21 aa, Artificial Sequence
  Description of Artificial Sequence: Synthetic peptide
LQPCSGFYECIERLIGVKLSG

SEQ ID NO: 1642 - protein, 17 aa, Artificial Sequence
  Description of Artificial Sequence: Synthetic peptide
LKDGFYDYFWQRLHLGS

SEQ ID NO: 1643 - protein, 21 aa, Artificial Sequence
  Description of Artificial Sequence: Synthetic peptide
VEGRGLFYDLLRQLLARRQNG

SEQ ID NO: 1644 - protein, 27 aa, Artificial Sequence
  Description of Artificial Sequence: Synthetic peptide
RGCNDDGGKGWSDDPFYHKLSELICGG

SEQ ID NO: 1645 - protein, 21 aa, Artificial Sequence
  Description of Artificial Sequence: Synthetic peptide
QGGSASFYDAIDRLLRMRIGG

SEQ ID NO: 1646 - protein, 27 aa, Artificial Sequence
  Description of Artificial Sequence: Synthetic peptide
RCEEKQAEVGPSSDPFYHKMSELLGCR

SEQ ID NO: 1647 - protein, 25 aa, Artificial Sequence
  Description of Artificial Sequence: Synthetic peptide
DRDFCRFYERLTALVGGQVDGGWPC

SEQ ID NO: 1648 - protein, 21 aa, Artificial Sequence
  Description of Artificial Sequence: Synthetic peptide
KLHNLMFYYGLQRLVWGAGLG

SEQ ID NO: 1649 - protein, 21 aa, Artificial Sequence
  Description of Artificial Sequence: Synthetic peptide
GNGDGMFYQLLSLLVGRDMHV

SEQ ID NO: 1650 - protein, 25 aa, Artificial Sequence
  Description of Artificial Sequence: Synthetic peptide
SSYGCDGFYLMLFSLGLVASQELEC

SEQ ID NO: 1651 - protein, 21 aa, Artificial Sequence
  Description of Artificial Sequence: Synthetic peptide
PDLHKGFYAQLAQLIRGQLLS

SEQ ID NO: 1652 - protein, 20 aa, Artificial Sequence
  Description of Artificial Sequence: Synthetic peptide
FYDAIDQLVRGSARAGGTRD

SEQ ID NO: 1653 - protein, 21 aa, Artificial Sequence
  Description of Artificial Sequence: Synthetic peptide
YSCGDGFYSLLSDLLGGQFRC

SEQ ID NO: 1654 - protein, 27 aa, Artificial Sequence
  Description of Artificial Sequence: Synthetic peptide
RGMKEEVLVGGSTDPFYHKLSELLQGS

SEQ ID NO: 1655 - protein, 21 aa, Artificial Sequence
  Description of Artificial Sequence: Synthetic peptide
IQQELTFYDLLHRLVRSELGS

SEQ ID NO: 1656 - protein, 21 aa, Artificial Sequence
  Description of Artificial Sequence: Synthetic peptide
GGTEVDFYRALERLVRGQLGL

SEQ ID NO: 1657 - protein, 20 aa, Artificial Sequence
  Description of Artificial Sequence: Synthetic peptide
LRIANLFYQRLWDLAFGGGG

SEQ ID NO: 1658 - protein, 26 aa, Artificial Sequence
  Description of Artificial Sequence: Synthetic peptide
  MOD_RES (6): Unknown amino acid; translation read-through at TGA stop codon
RCGRWXAEMGAGDDPFYHKLSELVCG

SEQ ID NO: 1659 - protein, 20 aa, Artificial Sequence
  Description of Artificial Sequence: Synthetic peptide
DRAFYNGLRDLVGAVYGAWD

SEQ ID NO: 1660 - protein, 21 aa, Artificial Sequence
  Description of Artificial Sequence: Synthetic peptide
PVGVQGFYEGLSRLVLGRGGW

SEQ ID NO: 1661 - protein, 21 aa, Artificial Sequence
  Description of Artificial Sequence: Synthetic peptide
RFSTDGFYQYLLALVGGGPVG

SEQ ID NO: 1662 - protein, 21 aa, Artificial Sequence
  Description of Artificial Sequence: Synthetic peptide
NSRDGGFYLQLERLLGFPVTG

SEQ ID NO: 1663 - protein, 21 aa, Artificial Sequence
  Description of Artificial Sequence: Synthetic peptide
  MOD_RES (18): Unknown amino acid
VVTPVNFYRALEALVRGXRLG

SEQ ID NO: 1664 - protein, 21 aa, Artificial Sequence
  Description of Artificial Sequence: Synthetic peptide
QPAPDGFYSALMKLIGRGGVS

SEQ ID NO: 1665 - protein, 21 aa, Artificial Sequence
  Description of Artificial Sequence: Synthetic peptide
PGTDLGFYQALRCVVIQGACD

SEQ ID NO: 1666 - protein, 21 aa, Artificial Sequence
  Description of Artificial Sequence: Synthetic peptide
AQPCGGFYGLLEQLVGRSVCD

SEQ ID NO: 1667 - protein, 21 aa, Artificial Sequence
  Description of Artificial Sequence: Synthetic peptide
QPDHSYFYSLLQELVGSEERL

SEQ ID NO: 1668 - protein, 25 aa, Artificial Sequence
  Description of Artificial Sequence: Synthetic peptide
QFYGCLLDLSLGVPSFGWRRRCITA

SEQ ID NO: 1669 - protein, 21 aa, Artificial Sequence
  Description of Artificial Sequence: Synthetic peptide
LGVTDGFYAALGYLIHGVGQF

SEQ ID NO: 1670 - protein, 21 aa, Artificial Sequence
  Description of Artificial Sequence: Synthetic peptide
  MOD_RES (4): Unknown amino acid
CMMXDGFYAGLGCLLTAGEGR

SEQ ID NO: 1671 - protein, 21 aa, Artificial Sequence
  Description of Artificial Sequence: Synthetic peptide
ICTGQGFYQVLCGLLRGTSAR

SEQ ID NO: 1672 - protein, 21 aa, Artificial Sequence
  Description of Artificial Sequence: Synthetic peptide
QGNVLDFYGWIGRLLAKQGSD

SEQ ID NO: 1673 - protein, 21 aa, Artificial Sequence
  Description of Artificial Sequence: Synthetic peptide
VATSQGFYSGLSELLQGGGNV

SEQ ID NO: 1674 - protein, 21 aa, Artificial Sequence
  Description of Artificial Sequence: Synthetic peptide
IWATGDFYRLLSQLVMGRVGT

SEQ ID NO: 1675 - protein, 17 aa, Artificial Sequence
  Description of Artificial Sequence: Synthetic peptide
EGSGFYGYFFSLLGLQG

SEQ ID NO: 1676 - protein, 21 aa, Artificial Sequence
  Description of Artificial Sequence: Synthetic peptide
RQGTGSFYLMLEQLLVGARGP

SEQ ID NO: 1677 - protein, 21 aa, Artificial Sequence
  Description of Artificial Sequence: Synthetic peptide
DSVGDNFYQLLESLVGGHGVG

SEQ ID NO: 1678 - protein, 30 aa, Artificial Sequence
  Description of Artificial Sequence: Synthetic peptide
RGIVAMVEATEVGSDHDPFYHKLSELVQGS

SEQ ID NO: 1679 - protein, 21 aa, Artificial Sequence
  Description of Artificial Sequence: Synthetic peptide
LSSDGQFYRALNLLLQGSAGR

SEQ ID NO: 1680 - protein, 21 aa, Artificial Sequence
  Description of Artificial Sequence: Synthetic peptide
ASSASGFYELLQRLAGLGLEV

SEQ ID NO: 1681 - protein, 25 aa, Artificial Sequence
  Description of Artificial Sequence: Synthetic peptide
FFYRCLSRLLGGQLGSRLGLSCIGD

SEQ ID NO: 1682 - protein, 17 aa, Artificial Sequence
  Description of Artificial Sequence: Synthetic peptide
IIGGFYSYFNSVLRLGT

SEQ ID NO: 1683 - protein, 21 aa, Artificial Sequence
  Description of Artificial Sequence: Synthetic peptide
PAGPCGFYCGLGLLLHGDQSP

SEQ ID NO: 1684 - protein, 21 aa, Artificial Sequence
  Description of Artificial Sequence: Synthetic peptide
RCQGTGFYTCIQELIGFGDPD

SEQ ID NO: 1685 - protein, 27 aa, Artificial Sequence
  Description of Artificial Sequence: Synthetic peptide
SGAKVIVVTGDSGDPFYHKLSELLQGS

SEQ ID NO: 1686 - protein, 21 aa, Artificial Sequence
  Description of Artificial Sequence: Synthetic peptide
VGTVAGFYDAIAQLVARASRV

SEQ ID NO: 1687 - protein, 21 aa, Artificial Sequence
  Description of Artificial Sequence: Synthetic peptide
TLRSPTFYDWLEMVLTHGQGG

SEQ ID NO: 1688 - protein, 17 aa, Artificial Sequence
  Description of Artificial Sequence: Synthetic peptide
RFDPFYSYFVNLLGASA

SEQ ID NO: 1689 - protein, 27 aa, Artificial Sequence
  Description of Artificial Sequence: Synthetic peptide
RGKTAAVIVGRPADPFYHKLSELLQGG

SEQ ID NO: 1690 - protein, 27 aa, Artificial Sequence
  Description of Artificial Sequence: Synthetic peptide
GCVVEWQKWHGASDPFYHKLSELGGCS

SEQ ID NO: 1691 - protein, 27 aa, Artificial Sequence
  Description of Artificial Sequence: Synthetic peptide
GRTMAVMAAGGPDDPFYHKLSELVQGG

SEQ ID NO: 1692 - protein, 27 aa, Artificial Sequence
  Description of Artificial Sequence: Synthetic peptide
GCAVVEEAERSRGDPFYHKLSELIQGC

SEQ ID NO: 1693 - protein, 26 aa, Artificial Sequence
  Description of Artificial Sequence: Synthetic peptide
GCEVIVEEGDSADPFYHKLSELCQGS

SEQ ID NO: 1694 - protein, 21 aa, Artificial Sequence
  Description of Artificial Sequence: Synthetic peptide
MMVVDGFYDALHQLVVAQSLG

SEQ ID NO: 1695 - protein, 21 aa, Artificial Sequence
  Description of Artificial Sequence: Synthetic peptide
LSVALSFYDALGQLVAGEGRW

SEQ ID NO: 1696 - protein, 27 aa, Artificial Sequence
  Description of Artificial Sequence: Synthetic peptide
GGTKAVAKVGTRDDPFYHKLSELLQGS

SEQ ID NO: 1697 - protein, 40 aa, Artificial Sequence
  Description of Artificial Sequence: Synthetic peptide
AETSVQVGWIRLQSVWPGEHWNTVDPFYHKLSELLRGSGA

SEQ ID NO: 1698 - protein, 27 aa, Artificial Sequence
  Description of Artificial Sequence: Synthetic peptide
SRAKVEAEMPDSGDPFYHKLSELLASG

SEQ ID NO: 1699 - protein, 27 aa, Artificial Sequence
  Description of Artificial Sequence: Synthetic peptide
SRVAATKEKRPSDDPFYHKLSELLQGS

SEQ ID NO: 1700 - protein, 27 aa, Artificial Sequence
  Description of Artificial Sequence: Synthetic peptide
SSETAKMVTGTRDDPFYHKLSELVQGS

SEQ ID NO: 1701 - protein, 24 aa, Artificial Sequence
  Description of Artificial Sequence: Synthetic peptide
GCITAENGAGDPFYHKLSELGGCS

SEQ ID NO: 1702 - protein, 28 aa, Artificial Sequence
  Description of Artificial Sequence: Synthetic peptide
RCGDEEGWQENRRDDPFYHKLSELFGGC

SEQ ID NO: 1703 - protein, 21 aa, Artificial Sequence
  Description of Artificial Sequence: Synthetic peptide
MNVFVSFYDAIDQLVCQRIGC

SEQ ID NO: 1704 - protein, 21 aa, Artificial Sequence
  Description of Artificial Sequence: Synthetic peptide
QSGSGDFYDWLSRLIRGNGDG

SEQ ID NO: 1705 - protein, 24 aa, Artificial Sequence
  Description of Artificial Sequence: Synthetic peptide
CGAKMTGTPNDPFYHKLSELLQRG

SEQ ID NO: 1706 - protein, 21 aa, Artificial Sequence
  Description of Artificial Sequence: Synthetic peptide
GHYFGSFYDAIDQLVAGMLPG

SEQ ID NO: 1707 - protein, 40 aa, Artificial Sequence
  Description of Artificial Sequence: Synthetic peptide
  MOD_RES (9): Unknown amino acid; translation read-through at TGA stop codon
AGTPAQVGXNRLWSVWPGEHWNTVDPFYNKLSELLRESGA

SEQ ID NO: 1708 - protein, 27 aa, Artificial Sequence
  Description of Artificial Sequence: Synthetic peptide
CSMAAVAEAGDDDDPFYHKLSELCQGS

SEQ ID NO: 1709 - protein, 40 aa, Artificial Sequence
  Description of Artificial Sequence: Synthetic peptide
  MOD_RES (30): Unknown amino acid; translation read-through at TGA stop codon
VDTPAQVGWNRLWSVGPGEHWYTDDPFYHXLSELLRESGA

SEQ ID NO: 1710 - protein, 40 aa, Artificial Sequence
  Description of Artificial Sequence: Synthetic peptide
AETSAQVGWQRLWSVWPGDHWSTLDPFYHKLSELLRESGA

SEQ ID NO: 1711 - protein, 21 aa, Artificial Sequence
  Description of Artificial Sequence: Synthetic peptide
AGSVTSFYDAMEQLVATGTSA

SEQ ID NO: 1712 - protein, 18 aa, Artificial Sequence
  Description of Artificial Sequence: Synthetic peptide
TDDGFYDALEQLVQGSKK

SEQ ID NO: 1713 - protein, 18 aa, Artificial Sequence
  Description of Artificial Sequence: Synthetic peptide
GSFYEALQRLVGGEQGKK

SEQ ID NO: 1714 - protein, 20 aa, Artificial Sequence
  Description of Artificial Sequence: Synthetic peptide
VRGFQGGTVWPGYEWLRNAA

SEQ ID NO: 1715 - protein, 40 aa, Artificial Sequence; identical to SEQ ID NO: 1109
  Description of Artificial Sequence: Synthetic peptide

SEQ ID NO: 1716 - protein, 39 aa, Artificial Sequence
  Description of Artificial Sequence: Synthetic peptide
GLDHSDAVGVHLGFAWPAQARGRWEAGGLEDTWAGYDWL

SEQ ID NO: 1717 - protein, 8 aa, Artificial Sequence
  Description of Artificial Sequence: Synthetic peptide
  MOD_RES (2): Unknown amino acid
WXGYAWLS

SEQ ID NO: 1718 - protein, 23 aa, Artificial Sequence
  Description of Artificial Sequence: Synthetic peptide
KRGGGTFYEWFESALRKHGAGKK

SEQ ID NO: 1719 - protein, 23 aa, Artificial Sequence
  Description of Artificial Sequence: Synthetic peptide
VTFTSAVFHENFYDWFVRQVSKK

SEQ ID NO: 1720 - protein, 21 aa, Artificial Sequence
  Description of Artificial Sequence: Synthetic peptide
NGVERAGTGDNFYDWFVAQLH

SEQ ID NO: 1721 - protein, 21 aa, Artificial Sequence
  Description of Artificial Sequence: Synthetic peptide
QSDSGTVHDRFYGWFRDTWAS

SEQ ID NO: 1722 - protein, 21 aa, Artificial Sequence
  Description of Artificial Sequence: Synthetic peptide
GRFYGWFQDAIDQLMPWGFDP

SEQ ID NO: 1723 - protein, 17 aa, Artificial Sequence
  Description of Artificial Sequence: Synthetic peptide
RYGRWGLAQQFYDWFDR

SEQ ID NO: 1724 - protein, 16 aa, Artificial Sequence
  Description of Artificial Sequence: Synthetic peptide
GFREGQRWYWFVAQVT

SEQ ID NO: 1725 - protein, 26 aa, Artificial Sequence
  Description of Artificial Sequence: Synthetic peptide
TYKARFLHENFYDWFNRQVSQYFGRV

SEQ ID NO: 1726 - protein, 21 aa, Artificial Sequence
  Description of Artificial Sequence: Synthetic peptide
WTDVDGFHSGFYRWFQNQWER

SEQ ID NO: 1727 - protein, 21 aa, Artificial Sequence
  Description of Artificial Sequence: Synthetic peptide
VASGHVLHGQFYRWFVDQFAL

SEQ ID NO: 1728 - protein, 21 aa, Artificial Sequence
  Description of Artificial Sequence: Synthetic peptide
QARVGNVHQQFYEWFREVMQG

SEQ ID NO: 1729 - protein, 21 aa, Artificial Sequence
  Description of Artificial Sequence: Synthetic peptide
TGHRLGLDEQFYWWFRDALSG

SEQ ID NO: 1730 - protein, 21 aa, Artificial Sequence
  Description of Artificial Sequence: Synthetic peptide
VGDFCVSHDCFYGWFLRESMQ

SEQ ID NO: 1731 - protein, 21 aa, Artificial Sequence
  Description of Artificial Sequence: Synthetic peptide
RMYFSTGAPQNFYDWFVQEWD

SEQ ID NO: 1732 - protein, 8 aa, Artificial Sequence
  Description of Artificial Sequence: Synthetic peptide
  MOD_RES (3)..(4): Unknown amino acid
  MOD_RES (6)..(7): Unknown amino acid
FYXXLXXL

SEQ ID NO: 1733 - protein, 23 aa, Artificial Sequence
  Description of Artificial Sequence: Synthetic peptide
KDRAFYNGLRDLVGAVYGAWDKK

SEQ ID NO: 1734 - protein, 26 aa, Artificial Sequence
  Description of Artificial Sequence: Synthetic peptide
DYKDFYDAIDQLVRGSARAGGTRDKK

SEQ ID NO: 1735 - protein, 21 aa, Artificial Sequence
  Description of Artificial Sequence: Synthetic peptide
EHWNTVDPFYFTLFEWLRESG

SEQ ID NO: 1736 - protein, 21 aa, Artificial Sequence
  Description of Artificial Sequence: Synthetic peptide
EHWNTVDPFYQYFSELLRESG

SEQ ID NO: 1737 - protein, 21 aa, Artificial Sequence
  Description of Artificial Sequence: Synthetic peptide
AGVNAGFYRYFSTLLDWWDQG

SEQ ID NO: 1738 - protein, 21 aa, Artificial Sequence
  Description of Artificial Sequence: Synthetic peptide
IQGWEPFYGWFDDVVAQMFEE

SEQ ID NO: 1739 - protein, 21 aa, Artificial Sequence
  Description of Artificial Sequence: Synthetic peptide
PPWGARFYDAIEQLVFDNLCC

SEQ ID NO: 1740 - protein, 17 aa, Artificial Sequence
  Description of Artificial Sequence: Synthetic peptide
RWPNFYGYFESLLTHFS

SEQ ID NO: 1741 - protein, 17 aa, Artificial Sequence
  Description of Artificial Sequence: Synthetic peptide
HYNAFYEYFQVLLAETW

SEQ ID NO: 1742 - protein, 21 aa, Artificial Sequence
  Description of Artificial Sequence: Synthetic peptide
IGRVRSFYDAIDKLFQSDWER

SEQ ID NO: 1743 - protein, 17 aa, Artificial Sequence
  Description of Artificial Sequence: Synthetic peptide
EGWDFYSYFSGLLASVT

SEQ ID NO: 1744 - protein, 21 aa, Artificial Sequence
  Description of Artificial Sequence: Synthetic peptide
SVKEVQFYRYFYDLLQSEESG

SEQ ID NO: 1745 - protein, 21 aa, Artificial Sequence
  Description of Artificial Sequence: Synthetic peptide
GNSGGSFYRYFQLLLDSDGMS

SEQ ID NO: 1746 - protein, 21 aa, Artificial Sequence
  Description of Artificial Sequence: Synthetic peptide
RDAGSSFYDAIDQLVCLTYFC

SEQ ID NO: 1747 - protein, 8 aa, Artificial Sequence
  Description of Artificial Sequence: Synthetic peptide
  MOD_RES (2)..(3): Unknown amino acid
  MOD_RES (5)..(6): Unknown amino acid
LXXLXXYF

SEQ ID NO: 1748 - protein, 17 aa, Artificial Sequence
  Description of Artificial Sequence: Synthetic peptide
LDALDRLMRYFEERPSL

SEQ ID NO: 1749 - protein, 20 aa, Artificial Sequence
  Description of Artificial Sequence: Synthetic peptide
PLAELWAYFEHSEQGRSSAH

SEQ ID NO: 1750 - protein, 17 aa, Artificial Sequence
  Description of Artificial Sequence: Synthetic peptide
LDPLDALLQYFWSVPGH

SEQ ID NO: 1751 - protein, 17 aa, Artificial Sequence
  Description of Artificial Sequence: Synthetic peptide
RGRLGSLSTQFYNWFAE

SEQ ID NO: 1752 - protein, 17 aa, Artificial Sequence
  Description of Artificial Sequence: Synthetic peptide
ADELEWLLDYFMHQPRP

SEQ ID NO: 1753 - protein, 17 aa, Artificial Sequence
  Description of Artificial Sequence: Synthetic peptide
DGVLEELFSYFSATVGP

SEQ ID NO: 1754 - protein, 7 aa, Artificial Sequence
  Description of Artificial Sequence: Synthetic peptide
  MOD_RES (3): Unknown amino acid
  MOD_RES (5): Unknown amino acid
WPXYXWL

SEQ ID NO: 1755 - protein, 20 aa, Artificial Sequence
  Description of Artificial Sequence: Synthetic peptide
WPGYLFFEEALQDWRGSTED

SEQ ID NO: 1756 - protein, 17 aa, Artificial Sequence
  Description of Artificial Sequence: Synthetic peptide
AAVHEQFYDWFADQYKK

SEQ ID NO: 1757 - protein, 17 aa, Artificial Sequence
  Description of Artificial Sequence: Synthetic peptide
QAPSNFYDWFVREWDKK

SEQ ID NO: 1758 - protein, 17 aa, Artificial Sequence
  Description of Artificial Sequence: Synthetic peptide
QSFYDYIEELLGGEWKK

SEQ ID NO: 1759 - protein, 17 aa, Artificial Sequence
  Description of Artificial Sequence: Synthetic peptide
DPFYQGLWEWLRESGKK

SEQ ID NO: 1760 - protein, 20 aa, Artificial Sequence
  Description of Artificial Sequence: Synthetic peptide
HLCVLEELFWGASLFGYCSG

SEQ ID NO: 1761 - protein, 20 aa, Artificial Sequence
  Description of Artificial Sequence: Synthetic peptide
FQSLLEELVWGAPLFRYGTG

SEQ ID NO: 1762 - protein, 20 aa, Artificial Sequence
  Description of Artificial Sequence: Synthetic peptide
PLCVLEELFWGASLFGYCSG

SEQ ID NO: 1763 - protein, 20 aa, Artificial Sequence
  Description of Artificial Sequence: Synthetic peptide
PLCVLEELFWGASLFGQCSG

SEQ ID NO: 1764 - protein, 20 aa, Artificial Sequence
  Description of Artificial Sequence: Synthetic peptide
HLCVLEELFWGASLFGQCSG

SEQ ID NO: 1765 - protein, 20 aa, Artificial Sequence
  Description of Artificial Sequence: Synthetic peptide
DLRVLCELFGGAYVLGYCSE

SEQ ID NO: 1766 - protein, 20 aa, Artificial Sequence
  Description of Artificial Sequence: Synthetic peptide
HRSVLKQLSWGASLFGQWAG

SEQ ID NO: 1767 - protein, 20 aa, Artificial Sequence
  Description of Artificial Sequence: Synthetic peptide
HLSVGEELSWWVALLGQWAR

SEQ ID NO: 1768 - protein, 20 aa, Artificial Sequence
  Description of Artificial Sequence: Synthetic peptide
APVSTEELRWGALLFGQWAG

SEQ ID NO: 1769 - protein, 23 aa, Artificial Sequence
  Description of Artificial Sequence: Synthetic peptide
KWLDQEWAWVQCEVYGRGCPSKK

SEQ ID NO: 1770 - protein, 20 aa, Artificial Sequence
  Description of Artificial Sequence: Synthetic peptide
QLEEEWAGVQCEVYGRECPS

SEQ ID NO: 1771 - protein, 20 aa, Artificial Sequence
  Description of Artificial Sequence: Synthetic peptide
ALEEEWAWVQVRSIRSGLPL

SEQ ID NO: 1772 - protein, 20 aa, Artificial Sequence
  Description of Artificial Sequence: Synthetic peptide
SLDQEWAWVQCEVYGRGCLS

SEQ ID NO: 1773 - protein, 20 aa, Artificial Sequence
  Description of Artificial Sequence: Synthetic peptide
WLEHEWAQIQCELYGRGCTY

SEQ ID NO: 1774 - protein, 20 aa, Artificial Sequence
  Description of Artificial Sequence: Synthetic peptide
GLEQGCPWVGLEVQCRGCPS

SEQ ID NO: 1775 - protein, 20 aa, Artificial Sequence
  Description of Artificial Sequence: Synthetic peptide
DLRVLCELFGGAYVLGYCSE

SEQ ID NO: 1776 - protein, 20 aa, Artificial Sequence
  Description of Artificial Sequence: Synthetic peptide
PLWGLCELFGGASLFGYCSS

SEQ ID NO: 1777 - protein, 12 aa, Artificial Sequence
  Description of Artificial Sequence: Synthetic peptide
GGSGGSGGSGGS

SEQ ID NO: 1778 - protein, 6 aa, Artificial Sequence
  Description of Artificial Sequence: Synthetic peptide
HHHHHH

SEQ ID NO: 1779 - protein, 8 aa, Artificial Sequence
  Description of Artificial Sequence: Synthetic peptide
DYKDDDDK

SEQ ID NO: 1780 - protein, 15 aa, Artificial Sequence
  Description of Artificial Sequence: Synthetic peptide
FHENFYDWFVRQVSK

SEQ ID NO: 1781 - protein, 24 aa, Artificial Sequence
  Description of Artificial Sequence: Synthetic peptide
DYKDFYDAIQLVRSARAGGTRDKK

SEQ ID NO: 1782 - protein, 18 aa, Artificial Sequence
  Description of Artificial Sequence: Synthetic peptide
FYDAIQLVRSARAGGTRD

SEQ ID NO: 1783 - protein, 27 aa, Artificial Sequence
  Description of Artificial Sequence: Synthetic peptide
DYKDVTFTSAVFHENFYDWFVRQVSKK

SEQ ID NO: 1784 - protein, 21 aa, Artificial Sequence
  Description of Artificial Sequence: Synthetic peptide
VTFTSAVFHENFYDWFVRQVS

SEQ ID NO: 1785 - protein, 4 aa, Artificial Sequence
  Description of Artificial Sequence: Synthetic peptide
GSLD

SEQ ID NO: 1786 - protein, 4 aa, Artificial Sequence
  Description of Artificial Sequence: Synthetic peptide
LGKK

SEQ ID NO: 1787 - protein, 15 aa, Artificial Sequence
  Description of Artificial Sequence: Synthetic peptide
GSLDESFYDWFERQL

SEQ ID NO: 1788 - protein, 14 aa, Artificial Sequence
  Description of Artificial Sequence: Synthetic peptide
GSLDESFYDWFERQ

SEQ ID NO: 1789 - protein, 13 aa, Artificial Sequence
  Description of Artificial Sequence: Synthetic peptide
GSLDESFYDWFER

SEQ ID NO: 1790 - protein, 11 aa, Artificial Sequence
  Description of Artificial Sequence: Synthetic peptide
ESFYDWFERQL

SEQ ID NO: 1791 - protein, 10 aa, Artificial Sequence
  Description of Artificial Sequence: Synthetic peptide
ESFYDWFERQ

SEQ ID NO: 1792 - protein, 38 aa, Artificial Sequence
  Description of Artificial Sequence: Synthetic peptide
  MOD_RES (19): Lig
  MOD_RES (38): Lig
GSLDESFYDWFERQLGKKXGSLDESFYDWFERQLGKKX

SEQ ID NO: 1793 - protein, 36 aa, Artificial Sequence
  Description of Artificial Sequence: Synthetic peptide
GSLDESFYDWFERQLGKKGSLDESFYDWFERQLGKK

SEQ ID NO: 1794 - protein, 12 aa, Artificial Sequence
  Description of Artificial Sequence: Synthetic peptide
ESFYDWFERQLG

SEQ ID NO: 1795 - protein, 26 aa, Artificial Sequence
  Description of Artificial Sequence: Synthetic peptide
ESFYDWFERQLGKESFYDWFERQLGK

SEQ ID NO: 1796 - protein, 24 aa, Artificial Sequence
  Description of Artificial Sequence: Synthetic peptide
ESFYDWFERQLGESFYDWFERQLG

SEQ ID NO: 1797 - protein, 16 aa, Artificial Sequence
  Description of Artificial Sequence: Synthetic peptide
FHENFYDWFVRQVAKK

SEQ ID NO: 1798 - protein, 16 aa, Artificial Sequence
  Description of Artificial Sequence: Synthetic peptide
FHENFYDWFVRQASKK

SEQ ID NO: 1799 - protein, 16 aa, Artificial Sequence
  Description of Artificial Sequence: Synthetic peptide
FHENFYDWFVRAVSKK

SEQ ID NO: 1800 - protein, 16 aa, Artificial Sequence
  Description of Artificial Sequence: Synthetic peptide
FHENFYDWFVAQVSKK

SEQ ID NO: 1801 - protein, 16 aa, Artificial Sequence
  Description of Artificial Sequence: Synthetic peptide
FHENFYDWFARQVSKK

SEQ ID NO: 1802 - protein, 16 aa, Artificial Sequence
  Description of Artificial Sequence: Synthetic peptide
FHEAFYDWFVRQVSKK

SEQ ID NO: 1803 - protein, 16 aa, Artificial Sequence
  Description of Artificial Sequence: Synthetic peptide
FHANFYDWFVRQVSKK

SEQ ID NO: 1804 - protein, 16 aa, Artificial Sequence
  Description of Artificial Sequence: Synthetic peptide
FAENFYDWFVRQVSKK

SEQ ID NO: 1805 - protein, 16 aa, Artificial Sequence
  Description of Artificial Sequence: Synthetic peptide
AHENFYDWFVRQVSKK

SEQ ID NO: 1806 - protein, 17 aa, Artificial Sequence
  Description of Artificial Sequence: Synthetic peptide
EFHENFYDWFVRQVSEE

SEQ ID NO: 1807 - protein, 16 aa, Artificial Sequence
  Description of Artificial Sequence: Synthetic peptide
FHENFYGWFVRQVSKK

SEQ ID NO: 1808 - protein, 13 aa, Artificial Sequence
  Description of Artificial Sequence: Synthetic peptide
HETFYSMIRSLAK

SEQ ID NO: 1809 - protein, 12 aa, Artificial Sequence
  Description of Artificial Sequence: Synthetic peptide
SDGFYNAIELLS

SEQ ID NO: 1810 - protein, 14 aa, Artificial Sequence
  Description of Artificial Sequence: Synthetic peptide
SLNFYDALQLLAKK

SEQ ID NO: 1811 - protein, 13 aa, Artificial Sequence
  Description of Artificial Sequence: Synthetic peptide
HDPFYSMMKSLLK

SEQ ID NO: 1812 - protein, 13 aa, Artificial Sequence
  Description of Artificial Sequence: Synthetic peptide
NSFYEALRMLSSK

SEQ ID NO: 1813 - protein, 13 aa, Artificial Sequence
  Description of Artificial Sequence: Synthetic peptide
HPTSKEIYAKLLK

SEQ ID NO: 1814 - protein, 13 aa, Artificial Sequence
  Description of Artificial Sequence: Synthetic peptide
HPSTNQMLMKLFK

SEQ ID NO: 1815 - protein, 14 aa, Artificial Sequence
  Description of Artificial Sequence: Synthetic peptide
HPPLSELKLFLIKK

SEQ ID NO: 1816 - protein, 12 aa, Artificial Sequence
  Description of Artificial Sequence: Synthetic peptide
WSDFYSYFQGLD

SEQ ID NO: 1817 - protein, 16 aa, Artificial Sequence
  Description of Artificial Sequence: Synthetic peptide
  SITE (16): This residue is chemically linked to the C-terminus of SEQ ID NO: 1818
FHENFYDWFVRQVSKK

SEQ ID NO: 1818 - protein, 17 aa, Artificial Sequence
  Description of Artificial Sequence: Synthetic peptide
  MOD_RES (1): Dap
XFHENFYDWFVRQVSKK

SEQ ID NO: 1819 - protein, 12 aa, Artificial Sequence
  Description of Artificial Sequence: Synthetic peptide
SSNFYQALMLLS

SEQ ID NO: 1820 - protein, 17 aa, Artificial Sequence
  Description of Artificial Sequence: Synthetic peptide
  MOD_RES (17): Lig
FHENFYDWFVRQVSKKX

SEQ ID NO: 1821 - protein, 15 aa, Artificial Sequence
  Description of Artificial Sequence: Synthetic peptide
HENFYGWFVRQVSKK

SEQ ID NO: 1822 - protein, 16 aa, Artificial Sequence
  Description of Artificial Sequence: Synthetic peptide
  SITE (16): This residue is chemically linked to the C-terminus of SEQ ID NO: 1823
FHENFYDWFVRQVSKK

SEQ ID NO: 1823 - protein, 17 aa, Artificial Sequence
  Description of Artificial Sequence: Synthetic peptide
KFHENFYDWFVRQVSKK

SEQ ID NO: 1824 - protein, 7 aa, Artificial Sequence
  Description of Artificial Sequence: Synthetic peptide
FYDWFKK

SEQ ID NO: 1825 - protein, 9 aa, Artificial Sequence
  Description of Artificial Sequence: Synthetic peptide
AFYDWFAKK

SEQ ID NO: 1826 - protein, 16 aa, Artificial Sequence
  Description of Artificial Sequence: Synthetic peptide
AAAAFYDWFAAAAAKK

SEQ ID NO: 1827 - protein, 17 aa, Artificial Sequence
  Description of Artificial Sequence: Synthetic peptide
  MOD_RES (1): Lig
  SITE (1): This residue is chemically linked to the N-terminus of SEQ ID NO: 1828
XFHENFYDWFVRQVSKK

SEQ ID NO: 1828 - protein, 17 aa, Artificial Sequence
  Description of Artificial Sequence: Synthetic peptide
  MOD_RES (1): Lig
XFHENFYDWFVRQVSKK

SEQ ID NO: 1829 - protein, 18 aa, Artificial Sequence
  Description of Artificial Sequence: Synthetic peptide
  SITE (1): This residue is chemically linked to the N-terminus of SEQ ID NO: 1830
CGFHENFYDWFVRQVSKK

SEQ ID NO: 1830 - protein, 18 aa, Artificial Sequence
  Description of Artificial Sequence: Synthetic peptide
CGFHENFYDWFVRQVSKK

SEQ ID NO: 1831 - protein, 18 aa, Artificial Sequence
  Description of Artificial Sequence: Synthetic peptide
CGFHENFYDWFVRQVSKK

SEQ ID NO: 1832 - protein, 17 aa, Artificial Sequence
  Description of Artificial Sequence: Synthetic peptide
  MOD_RES (1): Lig
  SITE (1): This residue is chemically linked to the N-terminus of SEQ ID NO: 1833
XFHENFYDWFVRQVSKK

SEQ ID NO: 1833 - protein, 17 aa, Artificial Sequence
  Description of Artificial Sequence: Synthetic peptide
  MOD_RES (1): Lig
XFHENFYDWFVRQVSKK

SEQ ID NO: 1834 - protein, 17 aa, Artificial Sequence
  Description of Artificial Sequence: Synthetic peptide
LDALDRLMRYFEERPSL

SEQ ID NO: 1835 - protein, 20 aa, Artificial Sequence
  Description of Artificial Sequence: Synthetic peptide
PLAELWAYFEHSEQGRSSAH

SEQ ID NO: 1836 - protein, 21 aa, Artificial Sequence
  Description of Artificial Sequence: Synthetic peptide
NGVERAGTGDNFYDWFVAQLH

SEQ ID NO: 1837 - protein, 21 aa, Artificial Sequence
  Description of Artificial Sequence: Synthetic peptide
EHWNTVDPFYFTLFEWLRESG

SEQ ID NO: 1838 - protein, 21 aa, Artificial Sequence
  Description of Artificial Sequence: Synthetic peptide
EHWNTVDPFYQYFSELLRESG

SEQ ID NO: 1839 - protein, 21 aa, Artificial Sequence
  Description of Artificial Sequence: Synthetic peptide
QSDSGTVHDRFYGWFRDTWAS

SEQ ID NO: 1840 - protein, 8 aa, Artificial Sequence
  Description of Artificial Sequence: Synthetic peptide
AFYDWFAK

SEQ ID NO: 1841 - protein, 7 aa, Artificial Sequence
  Description of Artificial Sequence: Synthetic peptide
AFYDWFA

SEQ ID NO: 1842 - protein, 6 aa, Artificial Sequence
  Description of Artificial Sequence: Synthetic peptide
AFYDWF

SEQ ID NO: 1843 - protein, 6 aa, Artificial Sequence
  Description of Artificial Sequence: Synthetic peptide
FYDWFA

SEQ ID NO: 1844 - protein, 5 aa, Artificial Sequence
  Description of Artificial Sequence: Synthetic peptide
FYDWF

SEQ ID NO: 1845 - protein, 9 aa, Artificial Sequence
  Description of Artificial Sequence: Synthetic peptide
AFYEWFAKK

SEQ ID NO: 1846 - protein, 9 aa, Artificial Sequence
  Description of Artificial Sequence: Synthetic peptide
AFYGWFAKK

SEQ ID NO: 1847 - protein, 9 aa, Artificial Sequence
  Description of Artificial Sequence: Synthetic peptide
AFYKWFAKK

SEQ ID NO: 1848 - protein, 13 aa, Artificial Sequence
  Description of Artificial Sequence: Synthetic peptide
  MOD_RES (13): Lig
  SITE (13): This residue is chemically linked to the C-terminus of SEQ ID NO: 1849
SDGFYNAIELLSX

SEQ ID NO: 1849 - protein, 13 aa, Artificial Sequence
  Description of Artificial Sequence: Synthetic peptide
  MOD_RES (13): Lig
SDGFYNAIELLSX

SEQ ID NO: 1850 - protein, 10 aa, Artificial Sequence
  Description of Artificial Sequence: Synthetic peptide
  MOD_RES (10): Lig
  SITE (10): This residue is chemically linked to the C-terminus of SEQ ID NO: 1851
AFYDWFAKKX

SEQ ID NO: 1851 - protein, 10 aa, Artificial Sequence
  Description of Artificial Sequence: Synthetic peptide
  MOD_RES (10): Lig
AFYDWFAKKX

SEQ ID NO: 1852 - protein, 16 aa, Artificial Sequence
  Description of Artificial Sequence: Synthetic peptide
FHENAYDWFVRQVSKK

SEQ ID NO: 1853 - protein, 16 aa, Artificial Sequence
  Description of Artificial Sequence: Synthetic peptide
FHENFADWFVRQVSKK

SEQ ID NO: 1854 - protein, 16 aa, Artificial Sequence
  Description of Artificial Sequence: Synthetic peptide
FHENFYAWFVRQVSKK

SEQ ID NO: 1855 - protein, 16 aa, Artificial Sequence
  Description of Artificial Sequence: Synthetic peptide
FHENFYDAFVRQVSKK

SEQ ID NO: 1856 - protein, 16 aa, Artificial Sequence
  Description of Artificial Sequence: Synthetic peptide
FHENFYDWAVRQVSKK

SEQ ID NO: 1857 - protein, 20 aa, Artificial Sequence
  Description of Artificial Sequence: Synthetic peptide
QLEEEWAGVQCEVYGRECPS

SEQ ID NO: 1858 - protein, 19 aa, Artificial Sequence
  Description of Artificial Sequence: Synthetic peptide
CGGFHENFYDWFVRQVSKK

SEQ ID NO: 1859 - protein, 19 aa, Artificial Sequence
  Description of Artificial Sequence: Synthetic peptide
  SITE (1): This residue is chemically linked to the N-terminus of SEQ ID NO: 1860
CGGFHENFYDWFVRQVSKK

SEQ ID NO: 1860 - protein, 19 aa, Artificial Sequence
  Description of Artificial Sequence: Synthetic peptide
CGGFHENFYDWFVRQVSKK

SEQ ID NO: 1861 - protein, 13 aa, Artificial Sequence
  Description of Artificial Sequence: Synthetic peptide
  MOD_RES (13): Lig
  SITE (13): This residue is chemically linked to the C-terminus of SEQ ID NO: 1862
SDGFYNAIELLSX

SEQ ID NO: 1862 - protein, 24 aa, Artificial Sequence
  Description of Artificial Sequence: Synthetic peptide
  MOD_RES (24): Lig
KHLCVLEELFWGASLFGYCSGKKX

SEQ ID NO: 1863 - protein, 20 aa, Artificial Sequence
  Description of Artificial Sequence: Synthetic peptide
  MOD_RES (20): Lig
  SITE (20): This residue is chemically linked to the C-terminus of SEQ ID NO: 1864
FHENFYDWFVRQVSKKGGGX

SEQ ID NO: 1864 - protein, 20 aa, Artificial Sequence
  Description of Artificial Sequence: Synthetic peptide
  MOD_RES (20): Lig
FHENFYDWFVRQVSKKGGGX

SEQ ID NO: 1865 - protein, 20 aa, Artificial Sequence
  Description of Artificial Sequence: Synthetic peptide
  MOD_RES (1): Lig
  SITE (1): This residue is chemically linked to the N-terminus of SEQ ID NO: 1866
XGGGFHENFYDWFVRQVSKK

SEQ ID NO: 1866 - protein, 20 aa, Artificial Sequence
  Description of Artificial Sequence: Synthetic peptide
  MOD_RES (1): Lig
XGGGFHENFYDWFVRQVSKK

SEQ ID NO: 1867 - protein, 17 aa, Artificial Sequence
  Description of Artificial Sequence: Synthetic peptide
  MOD_RES (17): Lig
  SITE (17): This residue is chemically linked to the C-terminus of SEQ ID NO: 1868
FHENFYDWFVRQVSKKX

SEQ ID NO: 1868 - protein, 13 aa, Artificial Sequence
  Description of Artificial Sequence: Synthetic peptide
  MOD_RES (13): Lig
SDGFYNAIELLSX

SEQ ID NO: 1869 - protein, 20 aa, Artificial Sequence
  Description of Artificial Sequence: Synthetic peptide
RVDWLQRNANFYDWFVAELG

SEQ ID NO: 1870 - protein, 19 aa, Artificial Sequence
  Description of Artificial Sequence: Synthetic peptide
VDWLQRNANFYDWFVAELG

SEQ ID NO: 1871 - protein, 18 aa, Artificial Sequence
  Description of Artificial Sequence: Synthetic peptide
DWLQRNANFYDWFVAELG

SEQ ID NO: 1872 - protein, 17 aa, Artificial Sequence
  Description of Artificial Sequence: Synthetic peptide
WLQRNANFYDWFVAELG

SEQ ID NO: 1873 - protein, 16 aa, Artificial Sequence
  Description of Artificial Sequence: Synthetic peptide
LQRNANFYDWFVAELG

SEQ ID NO: 1874 - protein, 15 aa, Artificial Sequence
  Description of Artificial Sequence: Synthetic peptide
QRNANFYDWFVAELG

SEQ ID NO: 1875 - protein, 14 aa, Artificial Sequence
  Description of Artificial Sequence: Synthetic peptide
RNANFYDWFVAELG

SEQ ID NO: 1876 - protein, 13 aa, Artificial Sequence
  Description of Artificial Sequence: Synthetic peptide
NANFYDWFVAELG

SEQ ID NO: 1877 - protein, 12 aa, Artificial Sequence
  Description of Artificial Sequence: Synthetic peptide
ANFYDWFVAELG

SEQ ID NO: 1878 - protein, 11 aa, Artificial Sequence
  Description of Artificial Sequence: Synthetic peptide
NFYDWFVAELG

SEQ ID NO: 1879 - protein, 22 aa, Artificial Sequence
  Description of Artificial Sequence: Synthetic peptide
  MOD_RES (22): Lig
GRVDWLQRNANFYDWFVAELGX

SEQ ID NO: 1880 - protein, 22 aa, Artificial Sequence
  Description of Artificial Sequence: Synthetic peptide
  MOD_RES (1): Lig
XGRVDWLQRNANFYDWFVAELG

SEQ ID NO: 1881 - protein, 15 aa, Artificial Sequence
  Description of Artificial Sequence: Synthetic peptide
  MOD_RES (15): Lig
  SITE (15): This residue is chemically linked to the C-terminus of SEQ ID NO: 1882
ACAWPTYWNCGGGGX

SEQ ID NO: 1882 - protein, 17 aa, Artificial Sequence
  Description of Artificial Sequence: Synthetic peptide
  MOD_RES (17): Lig
FHENFYDWFVRQVSKKX

SEQ ID NO: 1883 - protein, 20 aa, Artificial Sequence
  Description of Artificial Sequence: Synthetic peptide
GRVDWLQRNANFYDWFVAEL

SEQ ID NO: 1884 - protein, 19 aa, Artificial Sequence
  Description of Artificial Sequence: Synthetic peptide
GRVDWLQRNANFYDWFVAE

SEQ ID NO: 1885 - protein, 18 aa, Artificial Sequence
  Description of Artificial Sequence: Synthetic peptide
GRVDWLQRNANFYDWFVA

SEQ ID NO: 1886 - protein, 17 aa, Artificial Sequence
  Description of Artificial Sequence: Synthetic peptide
GRVDWLQRNANFYDWFV

SEQ ID NO: 1887 - protein, 13 aa, Artificial Sequence
  Description of Artificial Sequence: Synthetic peptide
  MOD_RES (13): Lig
  SITE (13): This residue is chemically linked to the C-terminus of SEQ ID NO: 1888
SDGFYNAIELLSX

SEQ ID NO: 1888 - protein, 13 aa, Artificial Sequence
  Description of Artificial Sequence: Synthetic peptide
  MOD_RES (13): Lig
SDGFYNAIELLSX

SEQ ID NO: 1889 - protein, 22 aa, Artificial Sequence
  Description of Artificial Sequence: Synthetic peptide
  MOD_RES (22): Lig
  SITE (22): This residue is chemically linked to the C-terminus of SEQ ID NO: 1890
GRVDWLQRNANFYDWFVAELGX

SEQ ID NO: 1890 - protein, 22 aa, Artificial Sequence
  Description of Artificial Sequence: Synthetic peptide
  MOD_RES (22): Lig
GRVDWLQRNANFYDWFVAELGX

SEQ ID NO: 1891 - protein, 16 aa, Artificial Sequence
  Description of Artificial Sequence: Synthetic peptide
  MOD_RES (16): Lig
  SITE (16): This residue is chemically linked to the C-terminus of SEQ ID NO: 1892
SDGFYNAIELLSGGGX

SEQ ID NO: 1892 - protein, 16 aa, Artificial Sequence
  Description of Artificial Sequence: Synthetic peptide
  MOD_RES (16): Lig
SDGFYNAIELLSGGGX

SEQ ID NO: 1893 - protein, 15 aa, Artificial Sequence
  Description of Artificial Sequence: Synthetic peptide
  MOD_RES (1): Acy
  MOD_RES (11): Tic
XCLEEWGASLXQCSG

SEQ ID NO: 1894 - protein, 17 aa, Artificial Sequence
  Description of Artificial Sequence: Synthetic peptide
RWPNFYGYFESLLTHFS

SEQ ID NO: 1895 - protein, 17 aa, Artificial Sequence
  Description of Artificial Sequence: Synthetic peptide
EGWDFYSYFSGLLASVT

SEQ ID NO: 1896 - protein, 17 aa, Artificial Sequence
  Description of Artificial Sequence: Synthetic peptide
LDRQFYRYFQDLLVGFM

SEQ ID NO: 1897 - protein, 17 aa, Artificial Sequence
  Description of Artificial Sequence: Synthetic peptide
WGRSFYRYFETLLAQGI

SEQ ID NO: 1898 - protein, 20 aa, Artificial Sequence
  Description of Artificial Sequence: Synthetic peptide
PLCFLQELFGGASLGGYCSG

SEQ ID NO: 1899 - protein, 20 aa, Artificial Sequence
  Description of Artificial Sequence: Synthetic peptide
WLEQERAWIWCEIQGSGCRA

SEQ ID NO: 1900 - protein, 21 aa, Artificial Sequence
  Description of Artificial Sequence: Synthetic peptide
IQGWEPFYGWFDDVVAQMFEE

SEQ ID NO: 1901 - protein, 21 aa, Artificial Sequence
  Description of Artificial Sequence: Synthetic peptide
TGHRLGLDEQFYWWFRDALSG

SEQ ID NO: 1902 - protein, 15 aa, Artificial Sequence
  Description of Artificial Sequence: Synthetic peptide
  MOD_RES (1): Abu
  MOD_RES (11): Tic
XCLEEWGASLXQCSG

SEQ ID NO: 1903 - protein, 11 aa, Artificial Sequence
  Description of Artificial Sequence: Synthetic peptide
  MOD_RES (3): Hyp
RDXFYDWFDDI

SEQ ID NO: 1904 - protein, 30 aa, Artificial Sequence
  Description of Artificial Sequence: Synthetic peptide
  MOD_RES (17)..(18): Lig
FHENFYDWFVRQVSKKXXSDGFYNAIELLS

SEQ ID NO: 1905 - protein, 16 aa, Artificial Sequence
  Description of Artificial Sequence: Synthetic peptide
GFREGQRWYWFVAQVT

SEQ ID NO: 1906 - protein, 20 aa, Artificial Sequence
  Description of Artificial Sequence: Synthetic peptide
DLRVLCELFGGAYVLGYCSE

SEQ ID NO: 1907 - protein, 20 aa, Artificial Sequence
  Description of Artificial Sequence: Synthetic peptide
HLSVGEELSWWVALLGQWAR

SEQ ID NO: 1908 - protein, 20 aa, Artificial Sequence
  Description of Artificial Sequence: Synthetic peptide
APVSTEELRWGALLFGQWAG

SEQ ID NO: 1909 - protein, 20 aa, Artificial Sequence
  Description of Artificial Sequence: Synthetic peptide
ALEEEWAWVQVRSIRSGLPL

SEQ ID NO: 1910 - protein, 20 aa, Artificial Sequence
  Description of Artificial Sequence: Synthetic peptide
WLEHEWAQIQCELYGRGCTY

SEQ ID NO: 1911 - protein, 17 aa, Artificial Sequence
  Description of Artificial Sequence: Synthetic peptide
QAPSNFYDWFVREWDEE

SEQ ID NO: 1912 - protein, 17 aa, Artificial Sequence
  Description of Artificial Sequence: Synthetic peptide
QSFYDYIEELLGGEWKK

SEQ ID NO: 1913 - protein, 17 aa, Artificial Sequence
  Description of Artificial Sequence: Synthetic peptide
DPFYQGLWEWLRESGEE

SEQ ID NO: 1914 - protein, 20 aa, Artificial Sequence
  Description of Artificial Sequence: Synthetic peptide
  MOD_RES (1): Lig
  SITE (1): This residue is chemically linked to the N-terminus of SEQ ID NO: 1915
XGGGFHENFYDWFVRQVSKK

SEQ ID NO: 1915 - protein, 20 aa, Artificial Sequence
  Description of Artificial Sequence: Synthetic peptide
  MOD_RES (1): Lig
XGGGFHENFYDWFVRQVSKK

SEQ ID NO: 1916 - protein, 20 aa, Artificial Sequence
  Description of Artificial Sequence: Synthetic peptide
  MOD_RES (1): Lig
  SITE (1): This residue is chemically linked to the N-terminus of SEQ ID NO: 1917
XGGGFHENFYDWFVRQVSKK

SEQ ID NO: 1917 - protein, 20 aa, Artificial Sequence
  Description of Artificial Sequence: Synthetic peptide
  MOD_RES (1): Lig
XGGGFHENFYDWFVRQVSKK

SEQ ID NO: 1918 - protein, 20 aa, Artificial Sequence
  Description of Artificial Sequence: Synthetic peptide
  MOD_RES (1): Lig
  SITE (1): This residue is chemically linked to the N-terminus of SEQ ID NO: 1919
XGGGFHENFYDWFVRQVSKK

SEQ ID NO: 1919 - protein, 20 aa, Artificial Sequence
  Description of Artificial Sequence: Synthetic peptide
  MOD_RES (1): Lig
XGGGFHENFYDWFVRQVSKK

SEQ ID NO: 1920 - protein, 20 aa, Artificial Sequence
  Description of Artificial Sequence: Synthetic peptide
  MOD_RES (1): Lig
  SITE (1): This residue is chemically linked to the N-terminus of SEQ ID NO: 1921
XGGGFHENFYDWFVRQVSKK

SEQ ID NO: 1921 - protein, 20 aa, Artificial Sequence
  Description of Artificial Sequence: Synthetic peptide
  MOD_RES (1): Lig
XGGGFHENFYDWFVRQVSKK

SEQ ID NO: 1922 - protein, 18 aa, Artificial Sequence
  Description of Artificial Sequence: Synthetic peptide
  MOD_RES (18): Lig
DWLQRNANFYDWFVAELX

SEQ ID NO: 1923 - protein, 18 aa, Artificial Sequence
  Description of Artificial Sequence: Synthetic peptide
  MOD_RES (1): Lig
XDWLQRNANFYDWFVAEL

SEQ ID NO: 1924 - protein, 17 aa, Artificial Sequence
  Description of Artificial Sequence: Synthetic peptide
  MOD_RES (17): Lig
  SITE (17): This residue is chemically linked to the C-terminus of SEQ ID NO: 1925
DWLQRNANFYDWFVAEX

SEQ ID NO: 1925 - protein, 17 aa, Artificial Sequence
  Description of Artificial Sequence: Synthetic peptide
  MOD_RES (17): Lig
DWLQRNANFYDWFVAEX

SEQ ID NO: 1926 - protein, 18 aa, Artificial Sequence
  Description of Artificial Sequence: Synthetic peptide
  MOD_RES (1): Lig
  SITE (1): This residue is chemically linked to the N-terminus of SEQ ID NO: 1927
XDWLQRNANFYDWFVAEL

SEQ ID NO: 1927 - protein, 18 aa, Artificial Sequence
  Description of Artificial Sequence: Synthetic peptide
  MOD_RES (1): Lig
XDWLQRNANFYDWFVAEL

SEQ ID NO: 1928 - protein, 13 aa, Artificial Sequence
  Description of Artificial Sequence: Synthetic peptide
  MOD_RES (8): Acy
SDGFYNAXELLSG

SEQ ID NO: 1929 - protein, 14 aa, Artificial Sequence
  Description of Artificial Sequence: Synthetic peptide
  MOD_RES (8): Acy
  MOD_RES (13): Aib
SGPFYEEXELLWXG

SEQ ID NO: 1930 - protein, 14 aa, Artificial Sequence
  Description of Artificial Sequence: Synthetic peptide
  MOD_RES (8): Acy
  MOD_RES (10): Aib
  MOD_RES (13): Aib
GGSFYDDXEXLWXG

SEQ ID NO: 1931 - protein, 14 aa, Artificial Sequence
  Description of Artificial Sequence: Synthetic peptide
  MOD_RES (2): Aib
  MOD_RES (8): Acy
  MOD_RES (11): Cha
  MOD_RES (13): Aib
NXPFYDEXDEXWXG

SEQ ID NO: 1932 - protein, 21 aa, Artificial Sequence
  Description of Artificial Sequence: Synthetic peptide
  MOD_RES (20): Acy
GRVDWLQRNANFYDWFVAEXG

SEQ ID NO: 1933 - protein, 20 aa, Artificial Sequence
  Description of Artificial Sequence: Synthetic peptide
  MOD_RES (1): Lig
  SITE (1): This residue is chemically linked to the N-terminus of SEQ ID NO: 1934
XGGGFHENFYDWFVRQVSKK

SEQ ID NO: 1934 - protein, 20 aa, Artificial Sequence
  Description of Artificial Sequence: Synthetic peptide
  MOD_RES (1): Lig
XGGGFHENFYDWFVRQVSKK

SEQ ID NO: 1935 - protein, 13 aa, Artificial Sequence
  Description of Artificial Sequence: Synthetic peptide
  MOD_RES (13): Lig
  SITE (13): This residue is chemically linked to the C-terminus of SEQ ID NO: 1935
SDGFYNAIELLSX

SEQ ID NO: 1936 - protein, 13 aa, Artificial Sequence
  Description of Artificial Sequence: Synthetic peptide
  MOD_RES (13): Lig
SDGFYNAIELLSX

SEQ ID NO: 1937 - protein, 8 aa, Artificial Sequence
  Description of Artificial Sequence: Synthetic peptide
WFYDWFWE

SEQ ID NO: 1938 - protein, 8 aa, Artificial Sequence
  Description of Artificial Sequence: Synthetic peptide
WQGYAWLS

SEQ ID NO: 1939 - protein, 8 aa, Artificial Sequence
  Description of Artificial Sequence: Synthetic peptide
WPGYAWLS

SEQ ID NO: 1940 - protein, 15 aa, Artificial Sequence
  Description of Artificial Sequence: Synthetic peptide
  MOD_RES (2): Aic
  MOD_RES (4): Aib
DXDXEFYDWFDEIPQ

SEQ ID NO: 1941 - protein, 15 aa, Artificial Sequence
  Description of Artificial Sequence: Synthetic peptide
KNNKEFYEWFDEIGQ

SEQ ID NO: 1942 - protein, 15 aa, Artificial Sequence
  Description of Artificial Sequence: Synthetic peptide
  MOD_RES (5): Hyp
YERDXFYDWFDEIGQ

SEQ ID NO: 1943 - protein, 15 aa, Artificial Sequence
  Description of Artificial Sequence: Synthetic peptide
  MOD_RES (5): Hyp
  MOD_RES (14): Hyp
EWRDXFYDWFDEIXE

SEQ ID NO: 1944 - protein, 19 aa, Artificial Sequence
  Description of Artificial Sequence: Synthetic peptide
  MOD_RES (1): Lig
  SITE (1): This residue is chemically linked to the N-terminus of SEQ ID NO: 1945
XGSLDESFYDWFERQLGKK

SEQ ID NO: 1945 - protein, 19 aa, Artificial Sequence
  Description of Artificial Sequence: Synthetic peptide
  MOD_RES (1): Lig
XGSLDESFYDWFERQLGKK

SEQ ID NO: 1946 - protein, 27 aa, Artificial Sequence
  Description of Artificial Sequence: Synthetic peptide
TFYSCLASLLTGTPQPNRGPWERCRKK

SEQ ID NO: 1947 - protein, 17 aa, Artificial Sequence
  Description of Artificial Sequence: Synthetic peptide
  MOD_RES (1): Lig
  SITE (1): This residue is chemically linked to the N-terminus of SEQ ID NO: 1948
XFHENFYDWFVRQVSKK

SEQ ID NO: 1948 - protein, 17 aa, Artificial Sequence
  Description of Artificial Sequence: Synthetic peptide
  MOD_RES (1): Lig
XFHENFYDWFVRQVSKK

SEQ ID NO: 1949 - protein, 23 aa, Artificial Sequence
  Description of Artificial Sequence: Synthetic peptide
KHLCVLEELFWGASLFGYCSGKK

SEQ ID NO: 1950 - protein, 19 aa, Artificial Sequence
  Description of Artificial Sequence: Synthetic peptide
  MOD_RES (19): Lig
  SITE (19): This residue is chemically linked to the C-terminus of SEQ ID NO: 1951
GSLDESFYDWFERQLGKKX

SEQ ID NO: 1951 - protein, 19 aa, Artificial Sequence
  Description of Artificial Sequence: Synthetic peptide
  MOD_RES (19): Lig
GSLDESFYDWFERQLGKKX

SEQ ID NO: 1952 - protein, 19 aa, Artificial Sequence
  Description of Artificial Sequence: Synthetic peptide
  MOD_RES (1): Lig
  SITE (1): This residue is chemically linked to the N-terminus of SEQ ID NO: 1953
XGSLDESFYDWFERQLGKK

SEQ ID NO: 1953 - protein, 19 aa, Artificial Sequence
  Description of Artificial Sequence: Synthetic peptide
  MOD_RES (1): Lig
XGSLDESFYDWFERQLGKK

SEQ ID NO: 1954 - protein, 20 aa, Artificial Sequence
  Description of Artificial Sequence: Synthetic peptide
  MOD_RES (1): Lig
  SITE (1): This residue is chemically linked to the N-terminus of SEQ ID NO: 1955
XGGGFHENFYDWFVRQVSKK

SEQ ID NO: 1955 - protein, 20 aa, Artificial Sequence
  Description of Artificial Sequence: Synthetic peptide
  MOD_RES (1): Lig
XGGGFHENFYDWFVRQVSKK

SEQ ID NO: 1956 - protein, 19 aa, Artificial Sequence
  Description of Artificial Sequence: Synthetic peptide
  MOD_RES (19): Lig
  SITE (19): This residue is chemically linked to the C-terminus of SEQ ID NO: 1957
GSLDESFYDWFERQLGKKX

SEQ ID NO: 1957 - protein, 19 aa, Artificial Sequence
  Description of Artificial Sequence: Synthetic peptide
  MOD_RES (19): Lig
GSLDESFYDWFERQLGKKX

SEQ ID NO: 1958 - protein, 19 aa, Artificial Sequence
  Description of Artificial Sequence: Synthetic peptide
  MOD_RES (1): Lig
  SITE (1): This residue is chemically linked to the N-terminus of SEQ ID NO: 1959
XGSLDESFYDWFERQLGKK

SEQ ID NO: 1959 - protein, 19 aa, Artificial Sequence
  Description of Artificial Sequence: Synthetic peptide
  MOD_RES (1): Lig
XGSLDESFYDWFERQLGKK

SEQ ID NO: 1960 - protein, 19 aa, Artificial Sequence
  Description of Artificial Sequence: Synthetic peptide
  MOD_RES (19): Lig
  SITE (19): This residue is chemically linked to the C-terminus of SEQ ID NO: 1961
GSLDESFYDWFERQLGKKX

SEQ ID NO: 1961 - protein, 19 aa, Artificial Sequence
  Description of Artificial Sequence: Synthetic peptide
  MOD_RES (19): Lig
GSLDESFYDWFERQLGKKX

SEQ ID NO: 1962 - protein, 21 aa, Artificial Sequence
  Description of Artificial Sequence: Synthetic peptide
DLWFNAKEDMNFYDWFVWQLR

SEQ ID NO: 1963 - protein, 22 aa, Artificial Sequence
  Description of Artificial Sequence: Synthetic peptide
EHWNTVDPFYHWISELLRESGA

SEQ ID NO: 1964 - protein, 22 aa, Artificial Sequence
  Description of Artificial Sequence: Synthetic peptide
EHWNTVDPFYQYFAELLRESGA

SEQ ID NO: 1965 - protein, 20 aa, Artificial Sequence
  Description of Artificial Sequence: Synthetic peptide
  MOD_RES (1): Lig
  SITE (1): This residue is chemically linked to the N-terminus of SEQ ID NO: 1966
XGGGFHENFYDWFVRQVSKK

SEQ ID NO: 1966 - protein, 20 aa, Artificial Sequence
  Description of Artificial Sequence: Synthetic peptide
  MOD_RES (1): Lig
XGGGFHENFYDWFVRQVSKK

SEQ ID NO: 1967 - protein, 19 aa, Artificial Sequence
  Description of Artificial Sequence: Synthetic peptide
  MOD_RES (19): Lig
  SITE (19): This residue is chemically linked to the C-terminus of SEQ ID NO: 1968
GSLDESFYDWFERQLGKKX

SEQ ID NO: 1968 - protein, 19 aa, Artificial Sequence
  Description of Artificial Sequence: Synthetic peptide
  MOD_RES (19): Lig
GSLDESFYDWFERQLGKKX

SEQ ID NO: 1969 - protein, 19 aa, Artificial Sequence
  Description of Artificial Sequence: Synthetic peptide
  MOD_RES (1): Lig
  SITE (1): This residue is chemically linked to the N-terminus of SEQ ID NO: 1970
XGSLDESFYDWFERQLGKK

SEQ ID NO: 1970 - protein, 19 aa, Artificial Sequence
  Description of Artificial Sequence: Synthetic peptide
  MOD_RES (1): Lig
XGSLDESFYDWFERQLGKK

SEQ ID NO: 1971 - protein, 20 aa, Artificial Sequence
  Description of Artificial Sequence: Synthetic peptide
  MOD_RES (1): Lig
  SITE (1): This residue is chemically linked to the N-terminus of SEQ ID NO: 1972
XGGGFHENFYDWFVRQVSKK

SEQ ID NO: 1972 - protein, 20 aa, Artificial Sequence
  Description of Artificial Sequence: Synthetic peptide
  MOD_RES (1): Lig
XGGGFHENFYDWFVRQVSKK

SEQ ID NO: 1973 - protein, 19 aa, Artificial Sequence
  Description of Artificial Sequence: Synthetic peptide
  MOD_RES (19): Lig
  SITE (19): This residue is chemically linked to the C-terminus of SEQ ID NO: 1974
GSLDESFYDWFERQLGKKX

SEQ ID NO: 1974 - protein, 19 aa, Artificial Sequence
  Description of Artificial Sequence: Synthetic peptide
  MOD_RES (19): Lig
GSLDESFYDWFERQLGKKX

SEQ ID NO: 1975 - protein, 19 aa, Artificial Sequence
  Description of Artificial Sequence: Synthetic peptide
  MOD_RES (1): Lig
  SITE (1): This residue is chemically linked to the N-terminus of SEQ ID NO: 1976
XGSLDESFYDWFERQLGKK

SEQ ID NO: 1976 - protein, 19 aa, Artificial Sequence
  Description of Artificial Sequence: Synthetic peptide
  MOD_RES (1): Lig
XGSLDESFYDWFERQLGKK

SEQ ID NO: 1977 - protein, 18 aa, Artificial Sequence
  Description of Artificial Sequence: Synthetic peptide
  MOD_RES (1): Lig
  SITE (1): This residue is chemically linked to the N-terminus of SEQ ID NO: 1978
XDWLQRNANFYDWFVAEL

SEQ ID NO: 1978 - protein, 18 aa, Artificial Sequence
  Description of Artificial Sequence: Synthetic peptide
  MOD_RES (1): Lig
XDWLQRNANFYDWFVAEL

SEQ ID NO: 1979 - protein, 18 aa, Artificial Sequence
  Description of Artificial Sequence: Synthetic peptide
  MOD_RES (1): Lig
  SITE (1): This residue is chemically linked to the N-terminus of SEQ ID NO: 1980
XDWLQRNANFYDWFVAEL

SEQ ID NO: 1980 - protein, 18 aa, Artificial Sequence
  Description of Artificial Sequence: Synthetic peptide
  MOD_RES (1): Lig
XDWLQRNANFYDWFVAEL

SEQ ID NO: 1981 - protein, 19 aa, Artificial Sequence
  Description of Artificial Sequence: Synthetic peptide
  MOD_RES (19): Lig
  SITE (19): This residue is chemically linked to the C-terminus of SEQ ID NO: 1982
GSLDESFYDWFERQLGKKX

SEQ ID NO: 1982 - protein, 19 aa, Artificial Sequence
  Description of Artificial Sequence: Synthetic peptide
  MOD_RES (19): Lig
GSLDESFYDWFERQLGKKX

SEQ ID NO: 1983 - protein, 19 aa, Artificial Sequence
  Description of Artificial Sequence: Synthetic peptide
  MOD_RES (1): Lig
  SITE (1): This residue is chemically linked to the N-terminus of SEQ ID NO: 1984
XGSLDESFYDWFERQLGKK

SEQ ID NO: 1984 - protein, 19 aa, Artificial Sequence
  Description of Artificial Sequence: Synthetic peptide
  MOD_RES (1): Lig
XGSLDESFYDWFERQLGKK

SEQ ID NO: 1985 - protein, 20 aa, Artificial Sequence
  Description of Artificial Sequence: Synthetic peptide
  MOD_RES (1): Lig
  SITE (1): This residue is chemically linked to the N-terminus of SEQ ID NO: 1986
XGGGFHENFYDWFVRQVSKK

SEQ ID NO: 1986 - protein, 20 aa, Artificial Sequence
  Description of Artificial Sequence: Synthetic peptide
  MOD_RES (1): Lig
XGGGFHENFYDWFVRQVSKK

SEQ ID NO: 1987 - protein, 21 aa, Artificial Sequence
  Description of Artificial Sequence: Synthetic peptide
RMYFSTGAPQNFYDWFVQEWD

SEQ ID NO: 1988 - protein, 17 aa, Artificial Sequence
  Description of Artificial Sequence: Synthetic peptide
PLRESRNFYDWFVQQLE

SEQ ID NO: 1989 - protein, 19 aa, Artificial Sequence
  Description of Artificial Sequence: Synthetic peptide
RGTRSDPFYHKLSELLQGH

SEQ ID NO: 1990 - protein, 19 aa, Artificial Sequence
  Description of Artificial Sequence: Synthetic peptide
SGSLDESFYDWFERQLGKK

SEQ ID NO: 1991 - protein, 20 aa, Artificial Sequence
  Description of Artificial Sequence: Synthetic peptide
GSLDESFYDWFERQLGKKKS

SEQ ID NO: 1992 - protein, 19 aa, Artificial Sequence
  Description of Artificial Sequence: Synthetic peptide
  MOD_RES (1): Ald
  SITE (1): This residue is chemically linked to the N-terminus of SEQ ID NO: 1993
XGSLDESFYDWFERQLGKK

SEQ ID NO: 1993 - protein, 19 aa, Artificial Sequence
  Description of Artificial Sequence: Synthetic peptide
  MOD_RES (1): Ald
XGSLDESFYDWFERQLGKK

SEQ ID NO: 1994 - protein, 39 aa, Artificial Sequence
  Description of Artificial Sequence: Synthetic peptide
  MOD_RES (20)..(21): Ald
GSLDESFYDWFERQLGKKKXXGSLDESFYDWFERQLGKK

SEQ ID NO: 1995 - protein, 19 aa, Artificial Sequence
  Description of Artificial Sequence: Synthetic peptide
  MOD_RES (1): Ald
  SITE (1): This residue is chemically linked to the N-terminus of SEQ ID NO: 1996
XGSLDESFYDWFERQLGKK

SEQ ID NO: 1996 - protein, 19 aa, Artificial Sequence
  Description of Artificial Sequence: Synthetic peptide
  MOD_RES (1): Ald
XGSLDESFYDWFERQLGKK

SEQ ID NO: 1997 - protein, 20 aa, Artificial Sequence
  Description of Artificial Sequence: Synthetic peptide
  MOD_RES (20): Ald
  SITE (20): This residue is chemically linked to the C-terminus of SEQ ID NO: 1998
GSLDESFYDWFERQLGKKKX

SEQ ID NO: 1998 - protein, 20 aa, Artificial Sequence
  Description of Artificial Sequence: Synthetic peptide
  MOD_RES (20): Ald
GSLDESFYDWFERQLGKKKX

SEQ ID NO: 1999 - protein, 20 aa, Artificial Sequence
  Description of Artificial Sequence: Synthetic peptide
  MOD_RES (20): Ald
  SITE (20): This residue is chemically linked to the C-terminus of SEQ ID NO: 2000
GSLDESFYDWFERQLGKKKX

SEQ ID NO: 2000 - protein, 20 aa, Artificial Sequence
  Description of Artificial Sequence: Synthetic peptide
  MOD_RES (20): Ald
GSLDESFYDWFERQLGKKKX

SEQ ID NO: 2001 - protein, 20 aa, Artificial Sequence
  Description of Artificial Sequence: Synthetic peptide
  MOD_RES (20): Lig
  SITE (20): This residue is chemically linked to the C-terminus of SEQ ID NO: 2002
EEDWLQRNANFYDWFVAELX

SEQ ID NO: 2002 - protein, 20 aa, Artificial Sequence
  Description of Artificial Sequence: Synthetic peptide
  MOD_RES (20): Lig
EEDWLQRNANFYDWFVAELX

SEQ ID NO: 2003 - protein, 20 aa, Artificial Sequence
  Description of Artificial Sequence: Synthetic peptide
  MOD_RES (20): Lig
  SITE (20): This residue is chemically linked to the C-terminus of SEQ ID NO: 2004
EEDWLQRNANFYDWFVAELX

SEQ ID NO: 2004 - protein, 20 aa, Artificial Sequence
  Description of Artificial Sequence: Synthetic peptide
  MOD_RES (20): Lig
EEDWLQRNANFYDWFVAELX

SEQ ID NO: 2005 - protein, 15 aa, Artificial Sequence
  Description of Artificial Sequence: Synthetic peptide
SLDESFYDWFERQLG

SEQ ID NO: 2006 - protein, 14 aa, Artificial Sequence
  Description of Artificial Sequence: Synthetic peptide
LDESFYDWFERQLG

SEQ ID NO: 2007 - protein, 13 aa, Artificial Sequence
  Description of Artificial Sequence: Synthetic peptide
DESFYDWFERQLG

SEQ ID NO: 2008 - protein, 11 aa, Artificial Sequence
  Description of Artificial Sequence: Synthetic peptide
SFYDWFERQLG

SEQ ID NO: 2009 - protein, 10 aa, Artificial Sequence
  Description of Artificial Sequence: Synthetic peptide
FYDWFERQLG

SEQ ID NO: 2010 - protein, 12 aa, Artificial Sequence
  Description of Artificial Sequence: Synthetic peptide
GSLDESFYDWFE

SEQ ID NO: 2011 - protein, 11 aa, Artificial Sequence
  Description of Artificial Sequence: Synthetic peptide
GSLDESFYDWF

SEQ ID NO: 2012 - protein, 9 aa, Artificial Sequence
  Description of Artificial Sequence: Synthetic peptide
ESFYDWFER

SEQ ID NO: 2013 - protein, 8 aa, Artificial Sequence
  Description of Artificial Sequence: Synthetic peptide
ESFYDWFE

SEQ ID NO: 2014 - protein, 7 aa, Artificial Sequence
  Description of Artificial Sequence: Synthetic peptide
ESFYDWF

SEQ ID NO: 2015 - protein, 14 aa, Artificial Sequence
  Description of Artificial Sequence: Synthetic peptide
  MOD_RES (14): Lig
  SITE (14): This residue is chemically linked to the C-terminus of SEQ ID NO: 2016
ESFYDWFERQLGKX

SEQ ID NO: 2016 - protein, 14 aa, Artificial Sequence
  Description of Artificial Sequence: Synthetic peptide
  MOD_RES (14): Lig
ESFYDWFERQLGKX

SEQ ID NO: 2017 - protein, 14 aa, Artificial Sequence
  Description of Artificial Sequence: Synthetic peptide
  MOD_RES (14): Lig
  SITE (14): This residue is chemically linked to the C-terminus of SEQ ID NO: 2018
ESFYDWFERQLGKX

SEQ ID NO: 2018 - protein, 14 aa, Artificial Sequence
  Description of Artificial Sequence: Synthetic peptide
  MOD_RES (14): Lig
ESFYDWFERQLGKX

SEQ ID NO: 2019 - protein, 13 aa, Artificial Sequence
  Description of Artificial Sequence: Synthetic peptide
  MOD_RES (1): Lig
  SITE (1): This residue is chemically linked to the N-terminus of SEQ ID NO: 2020
XESFYDWFERQLG

SEQ ID NO: 2020 - protein, 13 aa, Artificial Sequence
  Description of Artificial Sequence: Synthetic peptide
  MOD_RES (1): Lig
XESFYDWFERQLG

SEQ ID NO: 2021 - protein, 13 aa, Artificial Sequence
  Description of Artificial Sequence: Synthetic peptide
  MOD_RES (1): Lig
  SITE (1): This residue is chemically linked to the N-terminus of SEQ ID NO: 2022
XESFYDWFERQLG

SEQ ID NO: 2022 - protein, 13 aa, Artificial Sequence
  Description of Artificial Sequence: Synthetic peptide
  MOD_RES (1): Lig
XESFYDWFERQLG

SEQ ID NO: 2023 - protein, 14 aa, Artificial Sequence
  Description of Artificial Sequence: Synthetic peptide
  MOD_RES (14): Ald
  SITE (14): This residue is chemically linked to the C-terminus of SEQ ID NO: 2024
ESFYDWFERQLGKX

SEQ ID NO: 2024 - protein, 14 aa, Artificial Sequence
  Description of Artificial Sequence: Synthetic peptide
  MOD_RES (14): Ald
ESFYDWFERQLGKX

SEQ ID NO: 2025 - protein, 24 aa, Artificial Sequence
  Description of Artificial Sequence: Synthetic peptide
  MOD_RES (1): Lig
  SITE (1): This residue is chemically linked to the N-terminus of SEQ ID NO: 2026
XEWLDQEWAWVQCEVYGRGCPSEE

SEQ ID NO: 2026 - protein, 24 aa, Artificial Sequence
  Description of Artificial Sequence: Synthetic peptide
  MOD_RES (1): Lig
XEWLDQEWAWVQCEVYGRGCPSEE

SEQ ID NO: 2027 - protein, 13 aa, Artificial Sequence
  Description of Artificial Sequence: Synthetic peptide
  MOD_RES (1): Ald
  SITE (1): This residue is chemically linked to the N-terminus of SEQ ID NO: 2028
XESFYDWFERQLG

SEQ ID NO: 2028 - protein, 13 aa, Artificial Sequence
  Description of Artificial Sequence: Synthetic peptide
  MOD_RES (1): Ald
XESFYDWFERQLG

SEQ ID NO: 2029 - protein, 13 aa, Artificial Sequence
  Description of Artificial Sequence: Synthetic peptide
  SITE (13): This residue is chemically linked to the C-terminus of SEQ ID NO: 2030
ESFYDWFERQLGK

SEQ ID NO: 2030 - protein, 11 aa, Artificial Sequence
  Description of Artificial Sequence: Synthetic peptide
ACAWPTYWNCG

SEQ ID NO: 2031 - protein, 43 aa, Artificial Sequence
  Description of Artificial Sequence: Synthetic peptide
  MOD_RES (19)..(20): Lig
GSLDESFYDWFERQLGKKXXEWLDQEWAWVQCEVYGRGCPSEE

SEQ ID NO: 2032 - protein, 43 aa, Artificial Sequence
  Description of Artificial Sequence: Synthetic peptide
  MOD_RES (24)..(25): Lig
EWLDQEWAWVQCEVYGRGCPSEEXXGSLDESFYDWFERQLGKK

SEQ ID NO: 2033 - protein, 16 aa, Artificial Sequence
  Description of Artificial Sequence: Synthetic peptide
  SITE (16): This residue is chemically linked to the C-terminus of SEQ ID NO: 2034
ESFYDWFERQLGGGGK

SEQ ID NO: 2034 - protein, 10 aa, Artificial Sequence
  Description of Artificial Sequence: Synthetic peptide
CEVYGRGCPS

SEQ ID NO: 2035 - protein, 16 aa, Artificial Sequence
  Description of Artificial Sequence: Synthetic peptide
  SITE (16): This residue is chemically linked to the C-terminus of SEQ ID NO: 2036
ESFYDWFERQLGGGGK

SEQ ID NO: 2036 - protein, 10 aa, Artificial Sequence
  Description of Artificial Sequence: Synthetic peptide
WLDQEWAWVQ

SEQ ID NO: 2037 - protein, 16 aa, Artificial Sequence
  Description of Artificial Sequence: Synthetic peptide
  SITE (16): This residue is chemically linked to the C-terminus of SEQ ID NO: 2038
ESFYDWFERQLGGGGK

SEQ ID NO: 2038 - protein, 20 aa, Artificial Sequence
  Description of Artificial Sequence: Synthetic peptide
WLDQEWAWVQCEVYGRGCPS

SEQ ID NO: 2039 - protein, 16 aa, Artificial Sequence
  Description of Artificial Sequence: Synthetic peptide
  SITE (16): This residue is chemically linked to the C-terminus of SEQ ID NO: 2040
ESFYDWFERQLGGGGK

SEQ ID NO: 2040 - protein, 19 aa, Artificial Sequence
  Description of Artificial Sequence: Synthetic peptide
LDQEWAWVQCEVYGRGCPS

SEQ ID NO: 2041 - protein, 16 aa, Artificial Sequence
  Description of Artificial Sequence: Synthetic peptide
  SITE (16): This residue is chemically linked to the C-terminus of SEQ ID NO: 2042
ESFYDWFERQLGGGGK

SEQ ID NO: 2042 - protein, 18 aa, Artificial Sequence
  Description of Artificial Sequence: Synthetic peptide
DQEWAWVQCEVYGRGCPS

SEQ ID NO: 2043 - protein, 16 aa, Artificial Sequence
  Description of Artificial Sequence: Synthetic peptide
  SITE (16): This residue is chemically linked to the C-terminus of SEQ ID NO: 2044
ESFYDWFERQLGGGGK

SEQ ID NO: 2044 - protein, 17 aa, Artificial Sequence
  Description of Artificial Sequence: Synthetic peptide
QEWAWVQCEVYGRGCPS

SEQ ID NO: 2045 - protein, 16 aa, Artificial Sequence
  Description of Artificial Sequence: Synthetic peptide
  SITE (16): This residue is chemically linked to the C-terminus of SEQ ID NO: 2046
ESFYDWFERQLGGGGK

SEQ ID NO: 2046 - protein, 16 aa, Artificial Sequence
  Description of Artificial Sequence: Synthetic peptide
EWAWVQCEVYGRGCPS

SEQ ID NO: 2047 - protein, 16 aa, Artificial Sequence
  Description of Artificial Sequence: Synthetic peptide
  SITE (16): This residue is chemically linked to the C-terminus of SEQ ID NO: 2048
ESFYDWFERQLGGGGK

SEQ ID NO: 2048 - protein, 15 aa, Artificial Sequence
  Description of Artificial Sequence: Synthetic peptide
WAWVQCEVYGRGCPS

SEQ ID NO: 2049 - protein, 16 aa, Artificial Sequence
  Description of Artificial Sequence: Synthetic peptide
  SITE (16): This residue is chemically linked to the C-terminus of SEQ ID NO: 2050
ESFYDWFERQLGGGGK

SEQ ID NO: 2050 - protein, 14 aa, Artificial Sequence
  Description of Artificial Sequence: Synthetic peptide
AWVQCEVYGRGCPS

SEQ ID NO: 2051 - protein, 16 aa, Artificial Sequence
  Description of Artificial Sequence: Synthetic peptide
  SITE (16): This residue is chemically linked to the C-terminus of SEQ ID NO: 2052
ESFYDWFERQLGGGGK

SEQ ID NO: 2052 - protein, 13 aa, Artificial Sequence
  Description of Artificial Sequence: Synthetic peptide
WVQCEVYGRGCPS

SEQ ID NO: 2053 - protein, 16 aa, Artificial Sequence
  Description of Artificial Sequence: Synthetic peptide
  SITE (16): This residue is chemically linked to the C-terminus of SEQ ID NO: 2054
ESFYDWFERQLGGGGK

SEQ ID NO: 2054 - protein, 12 aa, Artificial Sequence
  Description of Artificial Sequence: Synthetic peptide
VQCEVYGRGCPS

SEQ ID NO: 2055 - protein, 16 aa, Artificial Sequence
  Description of Artificial Sequence: Synthetic peptide
  SITE (16): This residue is chemically linked to the C-terminus of SEQ ID NO: 2056
ESFYDWFERQLGGGGK

SEQ ID NO: 2056 - protein, 11 aa, Artificial Sequence
  Description of Artificial Sequence: Synthetic peptide
QCEVYGRGCPS

SEQ ID NO: 2057 - protein, 45 aa, Artificial Sequence
  Description of Artificial Sequence: Synthetic peptide
  MOD_RES (20)..(21): Ald
GSLDESFYDWFERQLGKKKXXKEWLDQEWAWVQCEVYGRGCPSEE

SEQ ID NO: 2058 - protein, 20 aa, Artificial Sequence
  Description of Artificial Sequence: Synthetic peptide
  MOD_RES (20): Ald
  SITE (20): This residue is chemically linked to the C-terminus of SEQ ID NO: 2059
GSLDESFYDWFERQLGKKKX

SEQ ID NO: 2059 - protein, 25 aa, Artificial Sequence
  Description of Artificial Sequence: Synthetic peptide
  MOD_RES (25): Ald
EWLDQEWAWVQCEVYGRGCPSEEKX

SEQ ID NO: 2060 - protein, 44 aa, Artificial Sequence
  Description of Artificial Sequence: Synthetic peptide
  MOD_RES (25)..(26): Ald
EWLDQEWAWVQCEVYGRGCPSEEKXXGSLDESFYDWFERQLGKK

SEQ ID NO: 2061 - protein, 19 aa, Artificial Sequence
  Description of Artificial Sequence: Synthetic peptide
  MOD_RES (1): Ald
XGSLDESFYDWFERQLGKK

SEQ ID NO: 2062 - protein, 25 aa, Artificial Sequence
  Description of Artificial Sequence: Synthetic peptide
  MOD_RES (1): Ald
XKEWLDQEWAWVQCEVYGRGCPSEE

SEQ ID NO: 2063 - protein, 42 aa, Artificial Sequence
  Description of Artificial Sequence: Synthetic peptide
WLDQEWAWVQCEVYGRGCPSGGSGGSGSLDESFYDWFERQLG

SEQ ID NO: 2064 - protein, 42 aa, Artificial Sequence; identical to SEQ ID NO: 2063
  Description of Artificial Sequence: Synthetic peptide

SEQ ID NO: 2065 - protein, 42 aa, Artificial Sequence
  Description of Artificial Sequence: Synthetic peptide
GSLDESFYDWFERQLGGGSGGSWLDQEWAWVQCEVYGRGCPS

SEQ ID NO: 2066 - protein, 44 aa, Artificial Sequence; identical to SEQ ID NO: 2060
  Description of Artificial Sequence: Synthetic peptide
  MOD_RES (25)..(26): Ald

SEQ ID NO: 2067 - protein, 44 aa, Artificial Sequence; identical to SEQ ID NO: 2060
  Description of Artificial Sequence: Synthetic peptide
  MOD_RES (25)..(26): Ald

SEQ ID NO: 2068 - protein, 31 aa, Artificial Sequence
  Description of Artificial Sequence: Synthetic peptide
LDQEWAWVQCEVYGRGCPSESFYDWFERQLG

SEQ ID NO: 2069 - protein, 38 aa, Artificial Sequence
  Description of Artificial Sequence: Synthetic peptide
HHHHHHKLDQEWAWVQCEVYGRGCPSESFYDWFERQLG

SEQ ID NO: 2070 - protein, 31 aa, Artificial Sequence; identical to SEQ ID NO: 2068
  Description of Artificial Sequence: Synthetic peptide

SEQ ID NO: 2071 - protein, 30 aa, Artificial Sequence
  Description of Artificial Sequence: Synthetic peptide
LDEWAWVQCVEYGRGCPSESFYDWFERQLG

SEQ ID NO: 2072 - protein, 30 aa, Artificial Sequence
  Description of Artificial Sequence: Synthetic peptide
LDQEWAVQCEVYGRGCPSESFYDWFERQLG

SEQ ID NO: 2073 - protein, 30 aa, Artificial Sequence
  Description of Artificial Sequence: Synthetic peptide
LDQEWAWVCEVYGRGCPSESFYDWFERQLG

SEQ ID NO: 2074 - protein, 30 aa, Artificial Sequence
  Description of Artificial Sequence: Synthetic peptide
LDQEWAWVQCVYGRGCPSESFYDWFERQLG

SEQ ID NO: 2075 - protein, 30 aa, Artificial Sequence
  Description of Artificial Sequence: Synthetic peptide
LDQEWAWVQCEVYGRCPSESFYDWFERQLG

SEQ ID NO: 2076 - protein, 30 aa, Artificial Sequence
  Description of Artificial Sequence: Synthetic peptide
LDQEWAWVQCEVYGRGCSESFYDWFERQLG

SEQ ID NO: 2077 - protein, 30 aa, Artificial Sequence
  Description of Artificial Sequence: Synthetic peptide
LDQEWAWVQCEVYGRGCPESFYDWFERQLG

SEQ ID NO: 2078 - protein, 29 aa, Artificial Sequence
  Description of Artificial Sequence: Synthetic peptide
LDQEWAWVQCEVYGRGCESFYDWFERQLG

SEQ ID NO: 2079 - protein, 30 aa, Artificial Sequence
  Description of Artificial Sequence: Synthetic peptide
LDQEWAWVQCEVYGRGCPSEFYDWFERQLG

SEQ ID NO: 2080 - protein, 30 aa, Artificial Sequence
  Description of Artificial Sequence: Synthetic peptide
LDQEWAWVQCEVYGRGCPSESFYDWFRQLG

SEQ ID NO: 2081 - protein, 23 aa, Artificial Sequence
  Description of Artificial Sequence: Synthetic peptide
EWLDQEWAWVQCEVYGRGCPSEE

SEQ ID NO: 2082 - protein, 31 aa, Artificial Sequence
  Description of Artificial Sequence: Synthetic peptide
ADQEWAWVQCEVYGRGCPSESFYDWFERQLG

SEQ ID NO: 2083 - protein, 30 aa, Artificial Sequence
  Description of Artificial Sequence: Synthetic peptide
LAQEWAWVQCEVYGRGCPSESFYDWFERQL

SEQ ID NO: 2084 - protein, 30 aa, Artificial Sequence
  Description of Artificial Sequence: Synthetic peptide
LDAEWAWVQCEVYGRGCPSESFYDWFERQL

SEQ ID NO: 2085 - protein, 30 aa, Artificial Sequence
  Description of Artificial Sequence: Synthetic peptide
LDQAWAWVQCEVYGRGCPSESFYDWFERQL

SEQ ID NO: 2086 - protein, 30 aa, Artificial Sequence
  Description of Artificial Sequence: Synthetic peptide
LDQEAAWVQCEVYGRGCPSESFYDWFERQL

SEQ ID NO: 2087 - protein, 30 aa, Artificial Sequence
  Description of Artificial Sequence: Synthetic peptide
LDQEWAAVQCEVYGRGCPSESFYDWFERQL

SEQ ID NO: 2088 - protein, 30 aa, Artificial Sequence
  Description of Artificial Sequence: Synthetic peptide
LDQEWAWAQCEVYGRGCPSESFYDWFERQL

SEQ ID NO: 2089 - protein, 30 aa, Artificial Sequence
  Description of Artificial Sequence: Synthetic peptide
LDQEWAWVACEVYGRGCPSESFYDWFERQL

SEQ ID NO: 2090 - protein, 30 aa, Artificial Sequence
  Description of Artificial Sequence: Synthetic peptide
LDQEWAWVQCAVYGRGCPSESFYDWFERQL

SEQ ID NO: 2091 - protein, 30 aa, Artificial Sequence
  Description of Artificial Sequence: Synthetic peptide
LDQEWAWVQCEAYGRGCPSESFYDWFERQL

SEQ ID NO: 2092 - protein, 30 aa, Artificial Sequence
  Description of Artificial Sequence: Synthetic peptide
LDQEWAWVQCEVAGRGCPSESFYDWFERQL

SEQ ID NO: 2093 - protein, 30 aa, Artificial Sequence
  Description of Artificial Sequence: Synthetic peptide
LDQEWAWVQCEVYARGCPSESFYDWFERQL

SEQ ID NO: 2094 - protein, 30 aa, Artificial Sequence
  Description of Artificial Sequence: Synthetic peptide
LDQEWAWVQCEVYGAGCPSESFYDWFERQL

SEQ ID NO: 2095 - protein, 30 aa, Artificial Sequence
  Description of Artificial Sequence: Synthetic peptide
LDQEWAWVQCEVYGRACPSESFYDWFERQL

SEQ ID NO: 2096 - protein, 30 aa, Artificial Sequence
  Description of Artificial Sequence: Synthetic peptide
LDQEWAWVQCEVYGRGCASESFYDWFERQL

SEQ ID NO: 2097 - protein, 30 aa, Artificial Sequence
  Description of Artificial Sequence: Synthetic peptide
LDQEWAWVQSEVYGRGSPSESFYDWFERQL

SEQ ID NO: 2098 - protein, 42 aa, Artificial Sequence
  Description of Artificial Sequence: Synthetic peptide
SLEEEWAQVECEVYGRGCPSGGSGGSGLLDESFYHWFDRQLR

SEQ ID NO: 2099 - protein, 47 aa, Artificial Sequence
  Description of Artificial Sequence: Synthetic peptide
WLDQEWAWVQCEVYGRGCPSGGSGGSGRVDWLQRNANFYDWFVAELG

SEQ ID NO: 2100 - protein, 44 aa, Artificial Sequence
  Description of Artificial Sequence: Synthetic peptide
WLDQEWAWVQCEVYGRGCPSGGSGGSSQAGSAFYAWFDQVLRTV

SEQ ID NO: 2101 - protein, 44 aa, Artificial Sequence
  Description of Artificial Sequence: Synthetic peptide
WLDQEWAWVQCEVYGRGCPSGGSGGSQSDAFYSGLWALIGLSDG

SEQ ID NO: 2102 - protein, 19 aa, Artificial Sequence
  Description of Artificial Sequence: Synthetic peptide
LDQEWAWVQCEVYGRGCPS

SEQ ID NO: 2103 - protein, 28 aa, Artificial Sequence
  Description of Artificial Sequence: Synthetic peptide
  MOD_RES (2): Acy
  MOD_RES (12): Tic
HXCLEEWGASLXQCSGSESFYDWFERQL

SEQ ID NO: 2104 - protein, 31 aa, Artificial Sequence
  Description of Artificial Sequence: Synthetic peptide
SIEEEWAQIKCDVWGRGCPSESFYDWFERQL

SEQ ID NO: 2105 - protein, 36 aa, Artificial Sequence
  Description of Artificial Sequence: Synthetic peptide
RLEEEWAWVQCEVYGRGCPSGSLDESFYDWFERQLG

SEQ ID NO: 2106 - protein, 36 aa, Artificial Sequence
  Description of Artificial Sequence: Synthetic peptide
SLEEEWAQVECEVYGRGCPSGSLDESFYDWFERQLG

SEQ ID NO: 2107 - protein, 36 aa, Artificial Sequence
  Description of Artificial Sequence: Synthetic peptide
SIEEEWAQIKCDVWGRGCPPGLLDESFYHWFDRQLR

SEQ ID NO: 2108 - protein, 35 aa, Artificial Sequence
  Description of Artificial Sequence: Synthetic peptide
HLCVLEELFWGASLFGYCSGGSLDESFYDWFERQL

SEQ ID NO: 2109 - protein, 41 aa, Artificial Sequence
  Description of Artificial Sequence: Synthetic peptide
HLCVLEELFWGASLFGYCSGGRVDWLQRNANFYDWFVAELG

SEQ ID NO: 2110 - protein, 35 aa, Artificial Sequence
  Description of Artificial Sequence: Synthetic peptide
WLDQEWAWVQCEVYGRGCPSDSDWAGYEWFEEQLD

SEQ ID NO: 2111 - protein, 43 aa, Artificial Sequence
  Description of Artificial Sequence: Synthetic peptide
HHHHHHKSLEEEWAQVECEVYGRGCPSGSLDESFYDWFERQLG

SEQ ID NO: 2112 - protein, 70 aa, Artificial Sequence
  Description of Artificial Sequence: Synthetic peptide
MADYKDDDDKGSLDESFYDWFERQLGKKGGSGGSGSLDESFYDWFERQLGKKAAAGAPVPYPDPLEPRPG

SEQ ID NO: 2113 - protein, 76 aa, Artificial Sequence
  Description of Artificial Sequence: Synthetic peptide
MADYKDDDDKGSLDESFYDWFERQLGKKGGSGGSGGSGGSGSLDESFYDWFERQLGKKAAAGAPVPYPDPLEPRPG

SEQ ID NO: 2114 - protein, 72 aa, Artificial Sequence
  Description of Artificial Sequence: Synthetic peptide
MADYKDDDDKGSLDESFYDWFERQLGKKGGSGGSWLDQEWAWVQCEVYGRGCPSAAAGAPVPYPDPLEPRPG

SEQ ID NO: 2115 - protein, 78 aa, Artificial Sequence
  Description of Artificial Sequence: Synthetic peptide
MADYKDDDDKGSLDESFYDWFERQLGKKGGSGGSGGSGGSWLDQEWAWVQCEVYGRGCPSAAAGAPVPYPDPLEPRPG

SEQ ID NO: 2116 - protein, 72 aa, Artificial Sequence
  Description of Artificial Sequence: Synthetic peptide
MADYKDDDDKWLDQEWAWVQCEVYGRGCPSGGSGGSGSLDESFYDWFERQLGKKAAAGAPVPYPDPLEPRPG

SEQ ID NO: 2117 - protein, 16 aa, Artificial Sequence
  Description of Artificial Sequence: Synthetic peptide
FHENFYDWFVQRVSKK

SEQ ID NO: 2118 - protein, 14 aa, Artificial Sequence
  Description of Artificial Sequence: Synthetic peptide
GGTVWPGYEWLRNA

SEQ ID NO: 2119 - protein, 41 aa, Artificial Sequence
  Description of Artificial Sequence: Synthetic peptide
HLCVLEELFWGASLFGYCSGGGSGGSGSLDESFYDWFERQL

SEQ ID NO: 2120 - protein, 47 aa, Artificial Sequence
  Description of Artificial Sequence: Synthetic peptide
HLCVLEELFWGASLFGYCSGGGSGGSGGSGGSGSLDESFYDWFERQL

SEQ ID NO: 2121 - protein, 47 aa, Artificial Sequence; identical to SEQ ID NO: 2099
  Description of Artificial Sequence: Synthetic peptide

SEQ ID NO: 2122 - protein, 53 aa, Artificial Sequence
  Description of Artificial Sequence: Synthetic peptide
WLDQEWAWVQCEVYGRGCPSGGSGGSGGSGGSGRVDWLQRNANFYDWFVAELG

SEQ ID NO: 2123 - protein, 47 aa, Artificial Sequence
  Description of Artificial Sequence: Synthetic peptide
HLCVLEELFWGASLFGYCSGGGSGGSGRVDWLQRNANFYDWFVAELG

SEQ ID NO: 2124 - protein, 53 aa, Artificial Sequence
  Description of Artificial Sequence: Synthetic peptide
HLCVLEELFWGASLFGYCSGGGSGGSGGSGGSGRVDWLQRNANFYDWFVAELG

SEQ ID NO: 2125 - protein, 44 aa, Artificial Sequence
  Description of Artificial Sequence: Synthetic peptide
HLCVLEELFWGASLFGYCSGGGSGGSSQAGSAFYAWFDQVLRTV

SEQ ID NO: 2126 - protein, 51 aa, Artificial Sequence
  Description of Artificial Sequence: Synthetic peptide
HLCVLEELFWGASLFGYCSGGGSGGSTFYSCLASLLTGTPQPNRGPWERCR

SEQ ID NO: 2127 - protein, 44 aa, Artificial Sequence
  Description of Artificial Sequence: Synthetic peptide
HLCVLEELFWGASLFGYCSGGGSGGSQSDAFYSGLWALIGLSDG

SEQ ID NO: 2128 - protein, 41 aa, Artificial Sequence
  Description of Artificial Sequence: Synthetic peptide
HLCVLEELFWGASLFGYCSGGGSGGSDSDWAGYEWFEEQLD

SEQ ID NO: 2129 - protein, 20 aa, Artificial Sequence
  Description of Artificial Sequence: Synthetic peptide
WLDQEWAWVQCEVYGRGCPS

SEQ ID NO: 2130 - protein, 18 aa, Artificial Sequence
  Description of Artificial Sequence: Synthetic peptide
SQAGSAFYAWFDQVLRTV

SEQ ID NO: 2131 - protein, 18 aa, Artificial Sequence
  Description of Artificial Sequence: Synthetic peptide
QSDAFYSGLWALIGLSDG

SEQ ID NO: 2132 - protein, 62 aa, Artificial Sequence
  Description of Artificial Sequence: Synthetic peptide
NNNNLGIEGRISEFIEGRAQPAMAWLDQEWAWVQCEVYGRGCPSAAAGAPVPYPDPLEPRAA

SEQ ID NO: 2133 - protein, 89 aa, Artificial Sequence
  Description of Artificial Sequence: Synthetic peptide
NNNNLGIEGRISEFIEGRAQPAMAWLDQEWAWVQCEVYGRGCPSGGSGGSKWLDQEWAWVQCEVYGRGCPSAAAGAPVPYPDPLEPRAA

SEQ ID NO: 2134 - protein, 74 aa, Artificial Sequence
  Description of Artificial Sequence: Synthetic peptide
NNNNLGIEGRISEFIEGRDYKDDDDKFHENFYDWFVRQVSGSGSLDALDRLMRYFEERPSLGAPVPYPDPLEPR

SEQ ID NO: 2135 - protein, 83 aa, Artificial Sequence
  Description of Artificial Sequence: Synthetic peptide
NNNNLGIEGRISEFIEGRDYKDDDKFHENFYDWFVRQVSGGSGGSHLCVLEELFWGASLFGYCSGAAAGAPVPYPDPLEPRAA

SEQ ID NO: 2136 - protein, 89 aa, Artificial Sequence
  Description of Artificial Sequence: Synthetic peptide
NNNNLGIEGRISEFIEGRDYKDDDKFHENFYDWFVRQVSGGSGGSGGSGGSHLCVLEELFWGASLFGYCSGAAAGAPVPYPDPLEPRAA

SEQ ID NO: 2137 - protein, 86 aa, Artificial Sequence
  Description of Artificial Sequence: Synthetic peptide
NNNNLGIEGRISEFIEGRDYKDDDKFHENFYDWFVRQVSGGSGGSGGSHLCVLEELFWGASLFGYCSGAAAGAPVPYPDPLEPRAA

SEQ ID NO: 2138 - protein, 94 aa, Artificial Sequence
  Description of Artificial Sequence: Synthetic peptide
NNNNLGIEGRISEFIEVRAQPAMARGGGTFYEWFESALRKHGAGGGSGGSGGSGGSRGGGTFYEWFESALRKHGAGAAAGAPVPYPDPLEPRAA

SEQ ID NO: 2139 - protein, 79 aa, Artificial Sequence
  Description of Artificial Sequence: Synthetic peptide
NNNNLGIEGRISEFIEGRAQPAMAFHENFYDWFVRQVSGGSGGSGGSFHENFYDWFVRQVSAAAGAPVPYPDPLEPRAA

SEQ ID NO: 2140 - protein, 56 aa, Artificial Sequence
  Description of Artificial Sequence: Synthetic peptide
NNNNLGIEGRISEFIEGRAQPAMAFHENFYDWFVRQVSAAAGAPVPYPDPLEPRAA

SEQ ID NO: 2141 - protein, 88 aa, Artificial Sequence
  Description of Artificial Sequence: Synthetic peptide
NNNNLGIEGRISEFIEGRAQPAMARGGGTFYEWFESTLRKHGAGGGSGGSRGGGTFYEWFESALRKHGAGAAAGAPVPYPDPLEPRAA

SEQ ID NO: 2142 - protein, 90 aa, Artificial Sequence
  Description of Artificial Sequence: Synthetic peptide
NNNNLGIEGRISEFIEGRAQPAMAFHENFYDWFVRQVSGGSFHENFYDWFVRQVSGGSFHENFYDWFVRQVSAAAGAPVPYPDPLEPRAA

SEQ ID NO: 2143 - protein, 73 aa, Artificial Sequence
  Description of Artificial Sequence: Synthetic peptide
NNNNLGIEGRISEFIEGRAQPAMAFHENFYDWFVRQVSGGSGGSFHENFYDWFVRQVSGAPVPYPDPLEPRAA

SEQ ID NO: 2144 - protein, 88 aa, Artificial Sequence
  Description of Artificial Sequence: Synthetic peptide
NNNNLGIEGRISEFIEGRAQPAMAFHENFYDWFVRQVSGGSGGSGGSGGSAQPAMAFHENFYDWFVRQVSAAAGAPVPYPDPLEPRAA

SEQ ID NO: 2145 - protein, 62 aa, Artificial Sequence
  Description of Artificial Sequence: Synthetic peptide
NNNNLGIEGRISEFIEGRAQPAMARGGGTFYEWFESALRKHGAGAAAGAPVPYPDPLEPRAA

SEQ ID NO: 2146 - protein, 73 aa, Artificial Sequence
  Description of Artificial Sequence: Synthetic peptide
NNNNLGIEGRISEFIEGRAQPAMAFHENFYDWFVRQVSGGSFHENFYDWFVRQVSAAAGAPVPYPDPLEPRAA

SEQ ID NO: 2147 - protein, 57 aa, Artificial Sequence
  Description of Artificial Sequence: Synthetic peptide
NNNNLGIEGRISEFIEGRDYKDDDDKFHENFYDWFVRQVSAAGAPVPYPDPLEPRAA

SEQ ID NO: 2148 - protein, 64 aa, Artificial Sequence
  Description of Artificial Sequence: Synthetic peptide
NNNNLGIEGRISEFIEGRDYKDDDDKHLCVLEELFWGASLFGYCSGAAAGAPVPYPDPLEPRAA

SEQ ID NO: 2149 - protein, 56 aa, Artificial Sequence
  Description of Artificial Sequence: Synthetic peptide
NNNNLGIEGRISEFGSADYKDLDALDRLMRYFEERPSLAAAGAPVPYPDPLEPRAA

SEQ ID NO: 2150 - protein, 83 aa, Artificial Sequence; identical to SEQ ID NO: 2135
  Description of Artificial Sequence: Synthetic peptide

SEQ ID NO: 2151 - protein, 65 aa, Artificial Sequence
  Description of Artificial Sequence: Synthetic peptide
DYKDDDKFHENFYDWFVRQVSGGSGGSHLCVLEELFWGASLFGYCSGAAAGAPVPYPDPLEPRAA

SEQ ID NO: 2152 - protein, 89 aa, Artificial Sequence; identical to SEQ ID NO: 2136
  Description of Artificial Sequence: Synthetic peptide

SEQ ID NO: 2153 - protein, 71 aa, Artificial Sequence
  Description of Artificial Sequence: Synthetic peptide
DYKDDDKFHENFYDWFVRQVSGGSGGSGGSGGSHLCVLEELFWGASLFGYCSGAAAGAPVPYPDPLEPRAA

SEQ ID NO: 2154 - protein, 86 aa, Artificial Sequence; identical to SEQ ID NO: 2137
  Description of Artificial Sequence: Synthetic peptide

SEQ ID NO: 2155 - protein, 68 aa, Artificial Sequence
  Description of Artificial Sequence: Synthetic peptide
DYKDDDKFHENFYDWFVRQVSGGSGGSGGSHLCVLEELFWGASLFGYCSGAAAGAPVPYPDPLEPRAA

SEQ ID NO: 2156 - protein, 18 aa, Artificial Sequence
  Description of Artificial Sequence: Synthetic peptide
LCQRLGVGWPGWLSGWCA

SEQ ID NO: 2157 - protein, 17 aa, Artificial Sequence
  Description of Artificial Sequence: Synthetic peptide
LCQSWGVRIGWLTGLCP

SEQ ID NO: 2158 - protein, 62 aa, Artificial Sequence; identical to SEQ ID NO: 2132
  Description of Artificial Sequence: Synthetic peptide

SEQ ID NO: 2159 - protein, 89 aa, Artificial Sequence; identical to SEQ ID NO: 2133
  Description of Artificial Sequence: Synthetic peptide

SEQ ID NO: 2160 - protein, 64 aa, Artificial Sequence; identical to SEQ ID NO: 2148
  Description of Artificial Sequence: Synthetic peptide

SEQ ID NO: 2161 - protein, 90 aa, Artificial Sequence
  Description of Artificial Sequence: Synthetic peptide
NNNNLGIEGRISEFIEGRDYKDDDDKHLCVLEELFWGASLFGYCSGGGSGGSHLCVLEELFWGASLFGYCSGAAAGAPVPYPDPLEPRAA

SEQ ID NO: 2162 - protein, 96 aa, Artificial Sequence
  Description of Artificial Sequence: Synthetic peptide
NNNNLGIEGRISEFIEGRDYKDDDDKHLCVLEELFWGASLFGYCSGGGSGGSGGSGGSHLCVLEELFWGASLFGYCSGAAAGAPVPYPDPLEPRAA

SEQ ID NO: 2163 - protein, 116 aa, Artificial Sequence
  Description of Artificial Sequence: Synthetic peptide
NNNNLGIEGRISEFIEGRDYKDDDDKHLCVLEELFWGASLFGYCSGGGSGGSHLCVLEELFWGASLFGYCSGGGSGGSHLCVLEELFWGASLFGYCSGAAAGAPVPYPDPLEPRAA

SEQ ID NO: 2164 - protein, 56 aa, Artificial Sequence; identical to SEQ ID NO: 2140
  Description of Artificial Sequence: Synthetic peptide

SEQ ID NO: 2165 - protein, 73 aa, Artificial Sequence; identical to SEQ ID NO: 2146
  Description of Artificial Sequence: Synthetic peptide

SEQ ID NO: 2166 - protein, 71 aa, Artificial Sequence
  Description of Artificial Sequence: Synthetic peptide
NNNNLGIEGRISEFIEGRAQPAMAFHENFYDWFVRQVSGGSGGSFHENFYDWFVRQVSGAPVPYPDPLEPR

SEQ ID NO: 2167 - protein, 79 aa, Artificial Sequence; identical to SEQ ID NO: 2139
  Description of Artificial Sequence: Synthetic peptide

SEQ ID NO: 2168 - protein, 88 aa, Artificial Sequence; identical to SEQ ID NO: 2144
  Description of Artificial Sequence: Synthetic peptide

SEQ ID NO: 2169 - protein, 90 aa, Artificial Sequence; identical to SEQ ID NO: 2142
  Description of Artificial Sequence: Synthetic peptide

SEQ ID NO: 2170 - protein, 65 aa, Artificial Sequence
  Description of Artificial Sequence: Synthetic peptide
NNNNLGIEGRISEFIEGRDYKDDDDKVRVDWLQRNANFYDWFVAELVAAAGAPVPYPDPLEPRAA

SEQ ID NO: 2171 - protein, 92 aa, Artificial Sequence
  Description of Artificial Sequence: Synthetic peptide
NNNNLGIEGRISEFIEGRDYKDDDDKVRVDWLQRNANFYDWFVAELGGGSGGSGRVDWLQRNANFYDWFVAELGAAAGAPVPYPDPLEPRAA

SEQ ID NO: 2172 - protein, 98 aa, Artificial Sequence
  Description of Artificial Sequence: Synthetic peptide
NNNNLGIEGRISEFIEGRDYKDDDDKVRVDWLQRNANFYAWFVAELGGGSGGSGGSGGSGRVDWLQRNANFYDWFVAELGAAAGAPVPYPDPLEPRAA

SEQ ID NO: 2173 - protein, 62 aa, Artificial Sequence; identical to SEQ ID NO: 2145
  Description of Artificial Sequence: Synthetic peptide

SEQ ID NO: 2174 - protein, 88 aa, Artificial Sequence; identical to SEQ ID NO: 2141
  Description of Artificial Sequence: Synthetic peptide

SEQ ID NO: 2175 - protein, 94 aa, Artificial Sequence; identical to SEQ ID NO: 2138
  Description of Artificial Sequence: Synthetic peptide

SEQ ID NO: 2176 - protein, 61 aa, Artificial Sequence
  Description of Artificial Sequence: Synthetic peptide
NNNNLGIEGRISEFIEGRDYKDDDDKGSLDESFYDWFERQLGKKAAGAPVPYPDPLEPRAA

SEQ ID NO: 2177 - protein, 86 aa, Artificial Sequence
  Description of Artificial Sequence: Synthetic peptide
NNNNLGIEGRISEFIEGRDYKDDDDKGSLDESFYDWFERQLGKKGGSGGSGSLDESFYDWFERQLGKKAAAGAPVPYPDPLEPRAA

SEQ ID NO: 2178 - protein, 92 aa, Artificial Sequence
  Description of Artificial Sequence: Synthetic peptide
NNNNLGIEGRISEFIEGRDYKDDDDKGSLDESFYDWFERQLGKKGGSGGSGGSGGSGSLDESFYDWFERQLGKKAAAGAPVPYPDPLEPRAA

SEQ ID NO: 2179 - protein, 57 aa, Artificial Sequence; identical to SEQ ID NO: 2147
  Description of Artificial Sequence: Synthetic peptide

SEQ ID NO: 2180 - protein, 64 aa, Artificial Sequence; identical to SEQ ID NO: 2148
  Description of Artificial Sequence: Synthetic peptide

SEQ ID NO: 2181 - protein, 56 aa, Artificial Sequence; identical to SEQ ID NO: 2149
  Description of Artificial Sequence: Synthetic peptide

SEQ ID NO: 2182 - protein, 76 aa, Artificial Sequence
  Description of Artificial Sequence: Synthetic peptide
NNNNLGIEGRISEFIEGRDYKDDDDKFHENFYDWFVRQVSGGSGGSLDALDRLMRYFEERPSLGAPVPYPDPLEPR

SEQ ID NO: 2183 - protein, 60 aa, Artificial Sequence
  Description of Artificial Sequence: Synthetic peptide
DYKDDDKFHENFYDWFVRQVSGSGSLDALDRLMRYFEERPSLAAAGAPVPYPDPLEPRAA

SEQ ID NO: 2184 - protein, 83 aa, Artificial Sequence; identical to SEQ ID NO: 2135
  Description of Artificial Sequence: Synthetic peptide

SEQ ID NO: 2185 - protein, 65 aa, Artificial Sequence; identical to SEQ ID NO: 2151
  Description of Artificial Sequence: Synthetic peptide

SEQ ID NO: 2186 - protein, 89 aa, Artificial Sequence; identical to SEQ ID NO: 2136
  Description of Artificial Sequence: Synthetic peptide

SEQ ID NO: 2187 - protein, 71 aa, Artificial Sequence; identical to SEQ ID NO: 2153
  Description of Artificial Sequence: Synthetic peptide

SEQ ID NO: 2188 - protein, 86 aa, Artificial Sequence; identical to SEQ ID NO: 2137
  Description of Artificial Sequence: Synthetic peptide

SEQ ID NO: 2189 - protein, 74 aa, Artificial Sequence
  Description of Artificial Sequence: Synthetic peptide
DYKDDDDKVRVDWLQRNANFYDWFVAELGGGSGGSGRVDWLQRNANFYDWFVAELGAAAGAPVPYPDPLEPRSA

SEQ ID NO: 2190 - protein, 80 aa, Artificial Sequence
  Description of Artificial Sequence: Synthetic peptide
DYKDDDDKVRVDWLQRNANFYAWFVAELGGGSGGSGGSGGSGRVDWLQRNANFYDWFVAELGAAAGAPVPYPDPLEPRAA

SEQ ID NO: 2191 - protein, 46 aa, Artificial Sequence
  Description of Artificial Sequence: Synthetic peptide
DYKDDDDKHLCVLEELFWGASLFGYCSGAAAGAPVPYPDPLEPRAA

SEQ ID NO: 2192 - protein, 72 aa, Artificial Sequence
  Description of Artificial Sequence: Synthetic peptide
DYKDDDDKHLCVLEELFWGASLFGYCSGGGSGGSHLCVLEELFWGASLFGYCSGAAAGAPVPYPDPLEPRAA

SEQ ID NO: 2193 - protein, 70 aa, Artificial Sequence; identical to SEQ ID NO: 2112
  Description of Artificial Sequence: Synthetic peptide

SEQ ID NO: 2194 - protein, 76 aa, Artificial Sequence; identical to SEQ ID NO: 2113
  Description of Artificial Sequence: Synthetic peptide

SEQ ID NO: 2195 - protein, 48 aa, Artificial Sequence
  Description of Artificial Sequence: Synthetic peptide
MADYKDDDDKWLDQEWAWVQCEVYGRGCPSAAAGAPVPYPDPLEPRPG

SEQ ID NO: 2196 - protein, 72 aa, Artificial Sequence; identical to SEQ ID NO: 2116
  Description of Artificial Sequence: Synthetic peptide

SEQ ID NO: 2197 - protein, 72 aa, Artificial Sequence; identical to SEQ ID NO: 2114
  Description of Artificial Sequence: Synthetic peptide

SEQ ID NO: 2198 - protein, 78 aa, Artificial Sequence; identical to SEQ ID NO: 2115
  Description of Artificial Sequence: Synthetic peptide

SEQ ID NO: 2199 - protein, 74 aa, Artificial Sequence
  Description of Artificial Sequence: Synthetic peptide
MADYKDEIEAEWGRVRCLVYGRCVGGGGSGGSGGSGGSGSLDESFYDWFERQLGKKAAAGAPVPYPDPLEPRPG

SEQ ID NO: 2200 - protein, 81 aa, Artificial Sequence
  Description of Artificial Sequence: Synthetic peptide
MADYKDDDDKWLDQEWAWVQCEVYGRGCPSQPPPPDITTHRADPQGSLDESFYDWFERQLGKKAAAGAPVPYPDPLEPRPG

SEQ ID NO: 2201 - protein, 79 aa, Artificial Sequence
  Description of Artificial Sequence: Synthetic peptide
MADYKDDDDKWLDQEWAWVQCEVYGRGCPSTPKPPTPPPLSADGSLDESFYDWFERQLGKKAAAGAPVPYPDPLEPRPG

SEQ ID NO: 2202 - protein, 29 aa, Artificial Sequence
  Description of Artificial Sequence: Synthetic peptide
MQNDDGSLDESFYDWFERQLGHHHHHHPG

SEQ ID NO: 2203 - protein, 31 aa, Artificial Sequence
  Description of Artificial Sequence: Synthetic peptide
MGSLDESFYDWFERQLGEEEGGDHHHHHHPG

SEQ ID NO: 2204 - protein, 35 aa, Artificial Sequence
  Description of Artificial Sequence: Synthetic peptide
MQNDDGSLDESFYDWFERQLGEEEGGDHHHHHHPG

SEQ ID NO: 2205 - protein, 13 aa, Artificial Sequence
  Description of Artificial Sequence: Synthetic peptide
GAPVPYPDPLEPR

SEQ ID NO: 2206 - protein, 20 aa, Artificial Sequence
  Description of Artificial Sequence: Synthetic peptide
WLDQERAWLWCEISGRGCLS

SEQ ID NO: 2207 - protein, 43 aa, Artificial Sequence
  Description of Artificial Sequence: Synthetic peptide
LDQERAWLWCEISGRGCLSGGSGGSGSLDESFYDWFERQLGKK

SEQ ID NO: 2208 - protein, 50 aa, Artificial Sequence
  Description of Artificial Sequence: Synthetic peptide
WLDQERAWLWCEISGRGCLSGGSGGSGGSGGSGSLDESFYDWFERQLGKK

SEQ ID NO: 2209 - protein, 24 aa, Artificial Sequence
  Description of Artificial Sequence: Synthetic peptide
DYKDFYDAIDQLVRGSARAGGTRD

SEQ ID NO: 2210 - protein, 52 aa, Artificial Sequence
  Description of Artificial Sequence: Synthetic peptide
WLDQERAWLWCEISGRGCLSGGSGGSGIISQSCPESFYDWFAGQVSDPWWCW

SEQ ID NO: 2211 - protein, 44 aa, Artificial Sequence
  Description of Artificial Sequence: Synthetic peptide
WLDQERAWLWCEISGRGCLSGGSGGSGSLDESFYDWFERQLGKK

SEQ ID NO: 2212 - protein, 50 aa, Artificial Sequence; identical to SEQ ID NO: 2208
  Description of Artificial Sequence: Synthetic peptide

SEQ ID NO: 2213 - protein, 36 aa, Artificial Sequence
  Description of Artificial Sequence: Synthetic peptide
GLDQEQAWVECEVYGRGCPYGSLDESFYDWFERQLG

SEQ ID NO: 2214 - protein, 42 aa, Artificial Sequence
  Description of Artificial Sequence: Synthetic peptide
RLEEEWAWVQCEVYGRGCPSGGSGGSGSLDESFYDWFERQLG

SEQ ID NO: 2215 - protein, 42 aa, Artificial Sequence
  Description of Artificial Sequence: Synthetic peptide
SLDREWACVKCEVYGRGCPCGGSGGSGSLDESFYDWFERQLG

SEQ ID NO: 2216 - protein, 42 aa, Artificial Sequence
  Description of Artificial Sequence: Synthetic peptide
SLEEEWAQVECEVYGRGCPSGGSGGSGSLDESFYDWFERQLG

SEQ ID NO: 2217 - protein, 42 aa, Artificial Sequence; identical to SEQ ID NO: 2098
  Description of Artificial Sequence: Synthetic peptide

SEQ ID NO: 2218 - protein, 42 aa, Artificial Sequence
  Description of Artificial Sequence: Synthetic peptide
SIEEEWAQIKCDVWGRGCPPGGSGGSGLLDESFYHWFDRQLR

SEQ ID NO: 2219 - protein, 37 aa, Artificial Sequence
  Description of Artificial Sequence: Synthetic peptide
QLDLEWAWVQCEVYGRGCGGSGSLDESFYDWFERQLG

SEQ ID NO: 2220 - protein, 33 aa, Artificial Sequence
  Description of Artificial Sequence: Synthetic peptide
QLDEEWAGVQCEVYGRGCSLDESFYDWFERQLG

SEQ ID NO: 2221 - protein, 42 aa, Artificial Sequence
  Description of Artificial Sequence: Synthetic peptide
RLEEEWRWVQCEVYGRGCAAGGSGGSGSLDESFYDWFERQLG

SEQ ID NO: 2222 - protein, 41 aa, Artificial Sequence
  Description of Artificial Sequence: Synthetic peptide
SLDQEWAWVQCEVYGRGCPSGGSGGSDSDWAGYEWFEEQLD

SEQ ID NO: 2223 - protein, 16 aa, Artificial Sequence
  Description of Artificial Sequence: Synthetic peptide
  MOD_RES (6): Asp or Leu
GLADEXFYEWFERQLR

SEQ ID NO: 2224 - protein, 16 aa, Artificial Sequence
  Description of Artificial Sequence: Synthetic peptide
  MOD_RES (9): Glu or Ala
GQLDEDFYXWFDRQLS

SEQ ID NO: 2225 - protein, 16 aa, Artificial Sequence
  Description of Artificial Sequence: Synthetic peptide
  MOD_RES (3): Met or Trp
  MOD_RES (9): Glu or Ala
GFXDESFYXWFERQLR

SEQ ID NO: 2226 - protein, 20 aa, Artificial Sequence
  Description of Artificial Sequence: Synthetic peptide
  MOD_RES (14): Tyr or Trp
SLEEEWAQIECEVXGRGCPS

SEQ ID NO: 2227 - protein, 20 aa, Artificial Sequence
  Description of Artificial Sequence: Synthetic peptide
WLDQEWVQCEVYGRGCPSKK

SEQ ID NO: 2228 - protein, 26 aa, Artificial Sequence
  Description of Artificial Sequence: Synthetic peptide
VGRASGFPENFYDWFGRQLSLQSGEQ

SEQ ID NO: 2229 - protein, 18 aa, Artificial Sequence
  Description of Artificial Sequence: Synthetic peptide
GSLDESFYDWFERQLGKK

SEQ ID NO: 2230 - protein, 24 aa, Artificial Sequence
  Description of Artificial Sequence: Synthetic peptide
DYKDCWARPCGDAANFYDWFVQQA

SEQ ID NO: 2231 - protein, 74 aa, Artificial Sequence
  Description of Artificial Sequence: Synthetic peptide
ADYKDWLDQERAWLWCEISGRGCLSAAAGAPADYKDDDDKGSLDESFYDWFERQLKKAAAGAPVPYPDPLEPRG

SEQ ID NO: 2232 - protein, 25 aa, Artificial Sequence
  Description of Artificial Sequence: Synthetic peptide
SFYSCLESLVNGPAEKSRGQWDGCR

SEQ ID NO: 2233 - protein, 27 aa, Artificial Sequence
  Description of Artificial Sequence: Synthetic peptide
TFYSCLASLLTGTPQPNRGPWERCRKK

SEQ ID NO: 2234 - protein, 25 aa, Artificial Sequence
  Description of Artificial Sequence: Synthetic peptide
SFYSCLESLVNGGAERSDGQWEGCR

SEQ ID NO: 2235 - protein, 25 aa, Artificial Sequence
  Description of Artificial Sequence: Synthetic peptide
SFYSCLGSLLTGAPQPIRGAWDRCR

SEQ ID NO: 2236 - protein, 27 aa, Artificial Sequence
  Description of Artificial Sequence: Synthetic peptide
TFYSCLASLLTGTPQPNRGPWERCRKK

SEQ ID NO: 2237 - protein, 36 aa, Artificial Sequence; identical to SEQ ID NO: 1793
  Description of Artificial Sequence: Synthetic peptide

SEQ ID NO: 2238 - protein, 40 aa, Artificial Sequence
  Description of Artificial Sequence: Synthetic peptide
  MOD_RES (19): diaminopropionic acid with a 2-aminohydroxyacetyl group on the side chain amino group
  MOD_RES (20): synthetic linker
  MOD_RES (21): diaminopropionic acid with a 2-aminohydroxyacetyl group on the side chain amino group
  MOD_RES (40): 2-(pyridine-4-yl)malonaldehyde
GSLDESFYDWFERQLGKKXXXGSLDESFYDWFERQLGKKX

SEQ ID NO: 2239 - protein, 74 aa, Artificial Sequence
  Description of Artificial Sequence: Synthetic peptide
ADYKDDDDKGSLDESFYDWFERQLAAAGAPADYKDDDDKGSLDESFYDWFERQLKKAAAGAPVPYPDPLEPRPG

SEQ ID NO: 2240 - protein, 65 aa, Artificial Sequence
  Description of Artificial Sequence: Synthetic peptide
ADYKDGIISQSCPESFYDWFFAGQVSDPWWCWGSLDESFYDWFERQLAAAGAPVPYPDPLEPRPG

SEQ ID NO: 2241 - protein, 84 aa, Artificial Sequence
  Description of Artificial Sequence: Synthetic peptide
ADYKDSFYSCLESLVNGGAERSDGQWEGCRGGSGGSGGSGGSSFYSCLESLVNGGAERSDGQWEGCRAAAGAPVPYPDPLEPRP

SEQ ID NO: 2242 - protein, 78 aa, Artificial Sequence
  Description of Artificial Sequence: Synthetic peptide
ADYKDDDDKGSLDESFYDWFERQLAAAGAPADYKDTFYSCLASLLTGTPQPNRGPWERCRAAAGAPVPYPDPLEPRPG

SEQ ID NO: 2243 - protein, 69 aa, Artificial Sequence
  Description of Artificial Sequence: Synthetic peptide
ADYKDGIISQSCPESFYDWFFAGQVSDPWWCWWLEQERAWIWCEKGSGCRAAAAGAPVPYPDPLEPRPG

SEQ ID NO: 2244 - protein, 75 aa, Artificial Sequence
  Description of Artificial Sequence: Synthetic peptide
ADYKDWLEQERAWIWCEKGSGCRAGGSGGSGGSGGSDDDKGSLDESFYDWFERQLGKKAAAGAPVPYPDPLEPRG

SEQ ID NO: 2245 - protein, 27 aa, Artificial Sequence
  Description of Artificial Sequence: Synthetic peptide
EISFRCQLFVLAGMHPCPVDVGGEGFE

SEQ ID NO: 2246 - protein, 27 aa, Artificial Sequence
  Description of Artificial Sequence: Synthetic peptide
EGSSICNLLARAQIVELALCEMGVQEE

SEQ ID NO: 2247 - protein, 27 aa, Artificial Sequence
  Description of Artificial Sequence: Synthetic peptide
EGYSWLRDVLMEKQAQLKREGSVGRQE

SEQ ID NO: 2248 - protein, 21 aa, Artificial Sequence
  Description of Artificial Sequence: Synthetic peptide
GRVDWLQRNANFYDWFVAELG

SEQ ID NO: 2249 - protein, 26 aa, Artificial Sequence
  Description of Artificial Sequence: Synthetic peptide
GIISQSCPESFYDWFAGQVSDPWWCW

SEQ ID NO: 2250 - protein, 56 aa, Artificial Sequence
  Description of Artificial Sequence: Synthetic peptide
ISGRGCLSGGSGGSGGSGGSGSLDESFYDWFERQLGKKAAAGAPVPYPDPLEPRPG

SEQ ID NO: 2251 - protein, 75 aa, Artificial Sequence; identical to SEQ ID NO: 2244
  Description of Artificial Sequence: Synthetic peptide

SEQ ID NO: 2252 - protein, 20 aa, Artificial Sequence
  Description of Artificial Sequence: Synthetic peptide
WLDQERAWLWCEISGRGCLS

SEQ ID NO: 2253 - protein, 20 aa, Artificial Sequence
  Description of Artificial Sequence: Synthetic peptide
GVDEVRAWLWCQISGLGCES

SEQ ID NO: 2254 - protein, 78 aa, Artificial Sequence
  Description of Artificial Sequence: Synthetic peptide
ADYKDDDDKGSLDESFYDWFERQLGKKGGSGGSGGSGGSDDDKGSLDESFYDWFERQLGKKAAAGAPVPYPDPLEPRG

SEQ ID NO: 2255 - protein, 81 aa, Artificial Sequence
  Description of Artificial Sequence: Synthetic peptide
ADYKDCWARPCGDAANFYDWFVQQASKKGGSGGSGGSGGSCWARPCGDAANFYDWFVQQASKKAAAGAPVPYPDPLEPRPG

SEQ ID NO: 2256 - protein, 83 aa, Artificial Sequence
  Description of Artificial Sequence: Synthetic peptide
ADYKDGIISQSCPESFYDWFAGQVSDPWWCWGGSGGSGIISQSCPESFYDWFAGQVSDPWWCWKKAAAGAPVPYPDPLEPRPG

SEQ ID NO: 2257 - protein, 83 aa, Artificial Sequence
  Description of Artificial Sequence: Synthetic peptide
ADYKDCWARPCGDAANFYDWFVQQASKKGGSGGSGGSGGSSFYSCLESLVNGGAERSDGQWEGCRAAAGAPVPYPDPLEPRPG

SEQ ID NO: 2258 - protein, 83 aa, Artificial Sequence
  Description of Artificial Sequence: Synthetic peptide
ADYKDSFYSCLESLVNGGAERSDGQWEGCRGGSGGSGGSGGSCWARPCGDAANFYDWFVQQASKKAAAGAPVPYPDPLEPRPG

SEQ ID NO: 2259 - protein, 63 aa, Artificial Sequence
  Description of Artificial Sequence: Synthetic peptide
ADYKDTFYSCLASLLTGTPQPNRGPWERCRGSLDESFYDWFERQLAAAGAPVPYPDPLEPRPG

SEQ ID NO: 2260 - protein, 36 aa, Artificial Sequence
  Description of Artificial Sequence: Synthetic peptide
WLDQERAWLWCEISGRGCLSGSLDESFYDWFERQLG

SEQ ID NO: 2261 - protein, 27 aa, Artificial Sequence
  Description of Artificial Sequence: Synthetic peptide
EDWLRCLGVILSGGLTELANTGCVQGE

SEQ ID NO: 2262 - protein, 27 aa, Artificial Sequence
  Description of Artificial Sequence: Synthetic peptide
ELQGFCELLATVTGVTGLGCLDYQPIE

SEQ ID NO: 2263 - protein, 78 aa, Artificial Sequence
  Description of Artificial Sequence: Synthetic peptide
ADYKDTFYSCLASLLTGTPQPNRGPWERCRAAAGAPADYKDWLEQERAWIWCEKGSGCRAAAAGAPVPYPDPLEPRPG

SEQ ID NO: 2264 - protein, 82 aa, Artificial Sequence
  Description of Artificial Sequence: Synthetic peptide
ADYKDSFYSCLESLVNGGAERSDGQWEGCRGGSGGSGGSGGSGVDEVRAWLWCQISGLGCESKKAAAGAPVPYPDPLEPRPG

SEQ ID NO: 2265 - protein, 82 aa, Artificial Sequence
  Description of Artificial Sequence: Synthetic peptide
ADYKDGVDEVRAWLWCQISGLGCESKKGGSGGSGGSGGSSFYSCLESLVNGGAERSDGQWEGCRAAAGAPVPYPDPLEPRPG

SEQ ID NO: 2266 - protein, 27 aa, Artificial Sequence
  Description of Artificial Sequence: Synthetic peptide
DYKDCWARPCGDAANFYDWFVQQASKK

SEQ ID NO: 2267 - protein, 26 aa, Artificial Sequence
  Description of Artificial Sequence: Synthetic peptide
SFYSCLESLVNGPAEKSRGQWDGCRK

SEQ ID NO: 2268 - protein, 19 aa, Artificial Sequence
  Description of Artificial Sequence: Synthetic peptide
  MOD_RES (19): 2-(pyridine-4-yl)malonaldehyde
GSLDESFYDWFERQLGKKX

SEQ ID NO: 2269 - protein, 19 aa, Artificial Sequence
  Description of Artificial Sequence: Synthetic peptide
  MOD_RES (1): 2-(pyridine-4-yl)malonaldehyde
XGSLDESFYDWFERQLGKK

SEQ ID NO: 2270 - protein, 21 aa, Artificial Sequence
  Description of Artificial Sequence: Synthetic peptide
  MOD_RES (1): 2-(pyridine-4-yl)malonaldehyde
XWLDQERAWLWCEISGRGCLS

SEQ ID NO: 2271 - protein, 27 aa, Artificial Sequence
  Description of Artificial Sequence: Synthetic peptide
  MOD_RES (27): diaminopropionic acid with a 2-aminohydroxyacetyl group on the side chain amino group
GIISQSCPESFYDWFAGQVSDPWWCWX
